(19) United States
(12) Patent Application Publication
(10) Pub. No.: US 2003/0237110 A9
(43) Pub. Date: Dec. 25, 2003

(54) Polynucleotides and polypeptides derived from corn seedling

(75) Inventors: Raghunath V. Lalgudi, Clayton, MO (US); Laura Y. Ito, Pleasanton, CA (US); Bradley K. Sherman, Oakland, CA (US)

Correspondence Address: INCYTE GENOMICS, INC., PATENT DEPARTMENT, 3160 Porter Drive, Palo Alto, CA, 94304, US

(73) Assignee: Incyte Pharmaceuticals, Inc.

(21) Appl. No.: 09/923,876

(22) Filed: Aug. 6, 2001

Related U.S. Application Data
(63) Continuation of application No. 09/298,329, filed on Apr. 21, 1999, now abandoned.
(60) Provisional application No. 60/085,331, filed on May 12, 1998.

(51) Int. Cl. A01H 5/00; C12N 15/82; C12N 5/14; C12N 15/29

(52) U.S. Cl. 800/298; 536/23.6; 435/6; 435/91.2; 536/24.1; 435/320.1; 435/419; 435/468

(57) ABSTRACT

The present invention provides purified, corn seedling-derived polynucleotides (cdps) which encode corn seedling-derived polypeptides (CDPs). The invention also provides for the use of cdps or their complements, oligonucleotides, or fragments in methods for determining altered gene expression, to recover regulatory elements, and to follow inheritance of desirable characteristics through hybrid breeding programs. The invention further provides for vectors and host cells containing cdps for the expression of CDPs. The invention additionally provides for (i) use of isolated and purified CDPs to induce antibodies and to screen libraries of compounds and (ii) use of anti-CDP antibodies in diagnostic assays.

[0001] This application claims the benefit of U.S. application Ser. No. 09/298,329, our Docket No. PL-0012 US, filed Apr. 21, 1999, which claimed the benefit of U.S. Provisional Application Ser. No. 60/085,331, our Docket No. PL-0012 P, filed on May 12, 1998.

[0002] A portion of the disclosure of this patent document contains material which is subject to copyright protection. The copyright owner has no objection to the facsimile reproduction by anyone of the patent document or the patent disclosure, as it appears in the Patent and Trademark Office patent file or records, but otherwise reserves all copyright rights whatsoever.

### DESCRIPTION OF THE COMPACT DISK-RECORDABLE (CD-R)

[0003] CD-R 1 contains Tables 1 and 2 formatted in tab-delimited ASCII text, the Sequence Listing formatted in plain ASCII text. CD-R 1 is labeled with Identification No. PL-0012-1 CON, Copy 1. The file containing Table 1 is entitled PL0012˜2.TXT, created on Aug. 6, 2001, and is 1,001 KB in size. The file containing Table 2 is entitled PL0012˜3.TXT, created on Aug. 6, 2001, and is 128 KB in size. The Sequence Listing is entitled PL-0012˜1.TXT, created on Aug. 6, 2001, and is 3,031 KB in size.

[0004] CD-R 2 is an exact copy of CD-R 1. CD-R 2 is labeled with Identification No. PL-00012-1 CON, Copy 2.

[0005] CD-R 3 contains the Computer Readable Form of the Sequence Listing in compliance with 37 C.F.R. §1.821(e), and specified by 37 C.F.R. §1.824. CD-R 3 is labeled with Identification No. PL-0012-1 CON, Copy 3. The file containing the Sequence Listing is entitled P10012˜1, created on Aug. 6, 2001, and is 3,031 KB in size.

[0006] The disclosure of Table 1, Table 2, and the Sequence Listing submitted as an electronic document on compact disc as described above are to be part of the permanent USPTO record of this patent application and are hereby expressly incorporated by reference.

### FIELD OF THE INVENTION

[0007] The present invention relates to nucleic and amino acid sequences derived from corn seedling and to the use of these sequences in the identification, evaluation, and alteration of desired characteristics associated with growth and development, disease resistance, environmental adaptability, quality, and yield.

### BACKGROUND OF THE INVENTION

[0008] The field of plant breeding deals with the manipulation of plant genomes with the purpose of improving characteristics of the plant. Plant breeders use data and methodology from plant physiology, genetics, biochemistry, pathology, statistics, and molecular biology. One of the most improved hybrid crops is corn, Zea mays (L.). Corn is presently the second-most economically important crop in the United States. Acreage of field corn (used for livestock feed, corn starch, corn syrup, fuel ethanol, and oil) and sweet corn (used fresh or processed for human consumption) exceeds that of any other agronomic crop. Annual losses, reduction in quality and yield, due to diseases and infestation may range from 7 to 17%. Studies of corn may be used as a model for other economically important agronomic grasses.

[0009] Corn is a monocotyledonous plant which has one seed leaf, uses the C₄ photosynthetic pathway, and has scattered vascular bundles. The mature plant is made up of roots, stem, leaves, and reproductive structures. The root system functions to anchor the plant and to absorb water and nutrients. The corn stem consists of a series of nodes, each bearing one bladelike leaf with parallel veins, and internodes, elongated stem sections. The stem and its leaves are commonly referred to as a stalk. Leaves arise alternately and are arranged in two rows along either side of the stem. The male reproductive structure is the tassel, and its flowers produce pollen. The female reproductive structure is the ear, and its flowers each have a silk for pollination. When a pollen grain is shed onto a silk and germinates, a pollen tube grows down the silk and delivers two sperm to the female gametophyte. Within the gametophyte, one sperm fertilizes the egg, and the other, two polar nuclei. The embryo and endosperm produced by this double fertilization develop into the seed which matures in about two months.

[0010] The vegetative (V) and reproductive (R) stages of growth for a corn plant are as follows: VE-emergence from the soil of the seedling leaf; V1-first true leaf; V2-second leaf; . . . V(n)-nth leaf; VT-tasseling stage; and reproductive stages, R1-silking; R2-blister; R3-milk; R4-dough; R5-dent; and R6-physiological maturity (Ritchie, S.W. et al. (1986) How a Corn Plant Develops, Iowa State University Cooperative Extension Service, Ames Iowa 48:1-21).

### Corn Seedling

[0011] A seedling encompasses the growth stages from the beginning of germination to the emergence of the first true leaf at V1. Three important environmental factors essential for seed germination are water, necessary for metabolic activity; oxygen, necessary for aerobic respiration; and acceptable temperature, ≧13° C. The coleorhiza, a sheathlike structure, grows through the mature ovary wall or pericarp, followed by the radicle, the primary root, which elongates and penetrates the coleorhiza. In addition to the radicle, three or four lateral, seminal roots, which arise from the cotyledonary node, grow through the pericarp then bend downward. The single cotyledon (seed leaf), the scutellum, remains permanently attached to the endosperm (the embryo's food storage tissue) within the grain. The young primary shoot (plumule) of the seedling is at first enclosed within a tubular ensheathing leaf, the coleoptile. After the primary root emerges, the coleoptile is pushed upward to the soil surface by elongation of the first stem internode (VE). The embryonic leaves soon emerge (V1), develop chlorophyll, and begin photosynthesis. The coleoptile persists for a time at the base of the shoot. (Foster, A. S. and E. M. Gifford, Jr. (1959) Comparative Morphology of Vascular Plants, W. H. Freeman & Co., San Francisco Calif., 555 pp.; Raven, P. et al. (1981) Biology of Plants, Worth Publishers Inc New York N.Y., 686 pp.).

### Problems Of Corn Seedlings

[0012] All parts of the corn plant are susceptible to diseases, insect infestations, and stress. These conditions are usually diagnosed by their above-ground leaf, stock, fruit and/or seed symptoms and are caused by fungi, bacteria, mycoplasmas and related organisms, viruses, nematodes, parasitic seed plants, insects and mites, and abnormal environmental conditions.

[0013] Fungal diseases are spread by spores that germinate under favorable conditions of temperature and moisture. Spores germinate to produce branched threads called hyphae that infect plants by direct penetration of the epidermis or through natural openings or wounds. Resting bodies (chlamydospores, sclerotia) allow fungi to survive under unfavorable conditions for long periods in the soil or in plant debris.

[0014] Germinating seed and seedlings may be attacked by a number of soilborne or seedborne fungi that cause seed rots, seedling wilt, and seedling blights. The fungi responsible include Fusarium spp., Pythium spp., Diplodia spp., Bipolaris maydis strain T, and Penicillium spp. Aboveground symptoms include yellowing, wilting and death of the leaves; rotting of seed before or during germination; soft rot of the culm near the ground and water-soaking of seedling tissues. The rotted area may be of different colors depending on the infecting fungal species. Seedling wilt symptoms include a gray color at the leaf tips extending rapidly throughout the whole leaf which result in complete collapse and death of the seedling within two days.

[0015] Plant-pathogenic bacteria are unicellular non-spore-forming rods with or without flagella which are spread by cultural practices, animals, water, and soil. Bacteria enter plants through wounds or natural openings and multiply rapidly inside the plant where they cause death of cells; abnormal growths; block water-conducting tissue; or break down the tissue structure. They can remain dormant on or within plant tissue, insects, soil, or equipment.

[0016] Goss' Bacterial Wilt and Blight caused by Clavibacter michiganensis ssp. nebraskensis, affects corn in the Midwest with seedlings more susceptible than more mature plants. In susceptible corn varieties, lesions cause the seedlings to wilt, wither, and die. C. michiganensis ssp. nebraskensis overwinters in infected corn debris left on the soil surface and in infected seed. Other important bacterial diseases affection corn seedlings include Stewart's Bacterial Wilt; Holcus Spot; Bacterial Leaf Blight; and Bacterial Stripe and Leaf Spot. Viruses are submicroscopic particles composed of nucleic acid and protein which are transmitted by biological vectors, e.g., aphids, leafhoppers, planthoppers, beetles, and other insects.

[0017] Maize Dwarf Mosaic Virus (MDMV) is a long, flexuous, rod-shaped virus which is transmitted on seed. Early infection produces plants which are stunted and may never produce flowers and seed. MDMV symptoms are highly variable and include narrow, light green or yellowish streaks along the leaf veins and/or dark green “islands” on a yellow background. Symptoms may be present on all leaves that develop following infection. Both environmental conditions and the developmental stage at which the plant is infected may cause a reduction in yield; infection of young plants early in the season causes the most significant losses. In addition, early infection may predispose corn to root and stalk rots and premature death.

[0018] Environmental conditions also affect growth, development, and yield by altering pathogen activity or host physiology. The severity of the excess, deficiency, or imbalance of soil nutrients or water; extreme soil acidity or alkalinity; very high or low temperatures; air pollutants; or mechanical, pesticide, or other injury can be deadly at the seedling stage (Shurtleff, M. C. et al. (1980) Compendium of Corn Diseases, APS Press, St. Paul Minn., 105 pp.).

### Corn Disease Control

[0019] To control corn diseases, it is necessary to disrupt disease development. Intervention requires understanding the pathogens, the spread of pathogens, disease cycles, and plant resistance. Disease control may be achieved by a single procedure (chemical sprays) or by the integrated use of environmental, genetic, and chemical factors. Successful, long-term disease control generally includes planting disease-resistant varieties, applying chemical control, and implementing sanitary cultural methods.

### SUMMARY OF THE INVENTION

[0020] The present invention provides nucleic acid sequences comprising corn seedling-derived polynucleotides (cdps) as presented in the Sequence Listing. Some of the cdps uniquely identify structural, functional, and regulatory genes of the corn seedling. The invention encompasses oligonucleotides, fragments, and derivatives of the cdps and provides nucleic acid sequences complementary to the nucleic acid sequences listed in the Sequence Listing.

[0021] The present invention further provides the following cdps of particular interest as identified by SEQ ID NO: 3537 (700162463H1), SEQ ID NO: 1161 (700158211H1), SEQ ID NO: 949 (700157856H1), SEQ ID NO: 3199 (700161822H1), SEQ ID NO: 1744 (700159434H1), SEQ ID NO: 1183 (700158258H1), SEQ ID NO: 377 (700156836H1), SEQ ID NO: 2501 (700160693H1), SEQ ID NO: 2527 (700160740H1), SEQ ID NO: 698 (700157394H1), SEQ ID NO: 2335 (700160435H1), SEQ ID NO: 1988 (700159867H1), SEQ ID NO: 2583 (700160844H1), SEQ ID NO: 585 (700157190H1), SEQ ID NO: 237 (700156608H1), SEQ ID NO: 2719 (700161045H1), SEQ ID NO: 266 (700156661H1), SEQ ID NO: 3021 (700161544H1), SEQ ID NO: 2040 (700159955H1), SEQ ID NO: 2224 (700160253H1), SEQ ID NO: 2761 (700161134H1), SEQ ID NO: 1166 (700158229H1), SEQ ID NO: 1164 (700158222H1), SEQ ID NO: 2479 (700160669H1), SEQ ID NO: 215 (700156563H1), SEQ ID NO: 2448 (700160623H1), SEQ ID NO: 2207 (700160227H1), SEQ ID NO: 2626 (700160906H1), SEQ ID NO: 1339 (700158532H1), SEQ ID NO: 2726 (700161054H1), SEQ ID NO: 336 (700156768H1), SEQ ID NO: 1963 (700159826H1), SEQ ID NO: 2285 (700160357H1), SEQ ID NO: 1969 (700159839H1), SEQ ID NO: 471 (700156989H1), SEQ ID NO: 3118 (700161689H1), SEQ ID NO: 2475 (700160665H1), SEQ ID NO: 2731 (700161064H1), SEQ ID NO: 1695 (700159330H1), SEQ ID NO: 35 (700142454H1), SEQ ID NO: 79 (700142522H1), SEQ ID NO: 2086 (700160030H1), SEQ ID NO: 2000 (700159882H1), SEQ ID NO: 1001 (700157954H1), SEQ ID NO: 1302 (700158460H1), SEQ ID NO: 1205 (700158305H1), SEQ ID NO: 2849 (700161279H1), SEQ ID NO: 2138 (700160112H1), SEQ ID NO: 224 (700156580H1), SEQ ID NO: 385 (700156847H1), SEQ ID NO: 3541 (700162468H1), SEQ ID NO: 3526 (700162448H1), SEQ ID NO: 2137 (700160111H1), SEQ ID NO: 1197 (700158287H1), SEQ ID NO: 2109 (700160067H1), SEQ ID NO: 1902 (700159726H1), SEQ ID NO: 2578 (700160832H1), SEQ ID NO: 1044 (700158022H1), SEQ ID NO: 956 (700157865H1), SEQ ID NO: 149 (700156439H1), SEQ ID NO: 1548 (700159028H1), SEQ ID NO: 3030 (700161557H1), SEQ ID NO: 2128 (700160091H1), SEQ ID NO: 3025 (700161550H1), SEQ ID NO: 195 (700156524H1), SEQ ID NO: 1385 (700158604H1), SEQ ID NO: 1091 (700158090H1), SEQ ID NO: 1517 (700158965H1), SEQ ID NO: 1439 (700158806H1), SEQ ID NO: 2755 (700161125H1), SEQ ID NO: 1449 (700158823H1), SEQ ID NO: 107 (700142566H1), SEQ ID NO: 2916 (700161388H1), SEQ ID NO: 3160 (700161766H1), SEQ ID NO: 3001 (700161515H1), SEQ ID NO: 1940 (700159780H1), SEQ ID NO: 2918 (700161390H1), SEQ ID NO: 426 (700156915H1), SEQ ID NO: 1024 (700157988H1), SEQ ID NO: 2468 (700160654H1), SEQ ID NO: 1886 (700159694H1), SEQ ID NO: 1160 (700158208H1), SEQ ID NO: 411 (700156889H1), SEQ ID NO: 1570 (700159068H1), SEQ ID NO: 3371 (700162137H1), SEQ ID NO: 1942 (700159783H1), SEQ ID NO: 3132 (700161719H1), SEQ ID NO: 138 (700156425H1), SEQ ID NO: 2870 (700161314H1), SEQ ID NO: 2624 (700160904H1), SEQ ID NO: 3518 (700162435H1), SEQ ID NO: 2931 (700161413H1), SEQ ID NO: 1649 (700159219H1), SEQ ID NO: 2477 (700160667H1), SEQ ID NO: 1513 (700158949H1), SEQ ID NO: 3340 (700162062H1), SEQ ID NO: 884 (700157746H1), SEQ ID NO: 1701 (700159340H1), SEQ ID NO: 2480 (700160671H1), SEQ ID NO: 938 (700157837H1), SEQ ID NO: 2834 (700161257H1), SEQ ID NO: 1020 (700157981H1), SEQ ID NO: 2272 (700160340H1), SEQ ID NO: 2055 (700159981H1), SEQ ID NO: 489 (700157022H1), SEQ ID NO: 1294 (700158449H1), SEQ ID NO: 1597 (700159125H1), SEQ ID NO: 1172 (700158240H1), SEQ ID NO: 1243 (700158366H1), SEQ ID NO: 2482 (700160674H1), SEQ ID NO: 2544 (700160768H1), SEQ ID NO: 2862 (700161296H1), SEQ ID NO: 2704 (700161024H1), SEQ ID NO: 2369 (700160492H1), SEQ ID NO: 3242 (700161894H1), SEQ ID NO: 2948 (700161439H1), SEQ ID NO: 1315 (700158484H1), SEQ ID NO: 2700 (700161016H1), SEQ ID NO: 1436 (700158695H1), SEQ ID NO: 1996 (700159877H1), SEQ ID NO: 172 (700156474H1), SEQ ID NO: 1787 (700159515H1), SEQ ID NO: 1929 (700159766H1), SEQ ID NO: 3601 (700162584H1), SEQ ID NO: 1615 (700159167H1), SEQ ID NO: 852 (700157686H1), SEQ ID NO: 2267 (700160335H1), SEQ ID NO: 2887 (700161344H1), SEQ ID NO: 803 (700157615H1), SEQ ID NO: 1878 (700159679H1), SEQ ID NO: 2026 (700159930H1), SEQ ID NO: 1250 (700158376H1), SEQ ID NO: 573 (700157172H1), SEQ ID NO: 105 (700142562H1), SEQ ID NO: 2205 (700160225H1), SEQ ID NO: 2389 (700160522H1), SEQ ID NO: 2876 (700161326H1), SEQ ID NO: 62 (700142492H1), SEQ ID NO: 2469 (700160658H1), SEQ ID NO: 1206 (700158310H1), SEQ ID NO: 666 (700157334H1), SEQ ID NO: 179 (700156486H1), SEQ ID NO: 1378 (700158590H1), SEQ ID NO: 3316 (700162025H1), SEQ ID NO: 578 (700157181H1), SEQ ID NO: 2433 (700160601H1), SEQ ID NO: 865 (700157712H1), SEQ ID NO: 1726 (700159386H1), SEQ ID NO: 3165 (700161772H1), SEQ ID NO: 1409 (700158643H1), SEQ ID NO: 2183 (700160186H1), SEQ ID NO: 2977 (700161476H1), SEQ ID NO: 1985 (700159863H1), SEQ ID NO: 768 (700157547H1), SEQ ID NO: 1499 (700158924H1), SEQ ID NO: 1404 (700158632H1), SEQ ID NO: 374 (700156831H1), SEQ ID NO: 1908 (700159733H1), SEQ ID NO: 1405 (700158636H1), SEQ ID NO: 1543 (700159020H1), SEQ ID NO: 2139 (700160115H1), SEQ ID NO: 1258 (700158387H1), SEQ ID NO: 3344 (700162066H1), SEQ ID NO: 3580 (700162539H1), SEQ ID NO: 1830 (700159602H2), SEQ ID NO: 3531 (700162455H1), SEQ ID NO: 515 (700157065H1), SEQ ID NO: 2723 (700161051H1), SEQ ID NO: 191 (700156519H1), SEQ ID NO: 3259 (700161925H1), SEQ ID NO: 622 (700157251H1), SEQ ID NO: 68 (700142503H1), SEQ ID NO: 32 (700142451H1), SEQ ID NO: 80 (700142523H1), SEQ ID NO: 2225 (700160259H1), SEQ ID NO: 37 (700142458H1), SEQ ID NO: 559 (700157147H1), SEQ ID NO: 581 (700157185H1), SEQ ID NO: 3042 (700161571H1), SEQ ID NO: 2789 (700161181H1), SEQ ID NO: 2692 (700161003H1), SEQ ID NO: 1493 (700158915H1), SEQ ID NO: 2431 (700160595H1), SEQ ID NO: 270 (700156667H1), SEQ ID NO: 2010 (700159905H1), SEQ ID NO: 3401 (700162185H1), SEQ ID NO: 3501 (700162392H1), SEQ ID NO: 307 (700156727H1), SEQ ID NO: 2830 (700161249H1), SEQ ID NO: 3464 (700162321H1), SEQ ID NO: 1034 (700158010H1), SEQ ID NO: 2573 (700160826H1), SEQ ID NO: 1657 (700159236H1), SEQ ID NO: 1646 (700159214H1), SEQ ID NO: 198 (700156531H1), SEQ ID NO: 151 (700156441H1), SEQ ID NO: 3257 (700161923H1), SEQ ID NO: 3553 (700162485H1), SEQ ID NO: 1839 (700159614H2), SEQ ID NO: 3056 (700161591H1), SEQ ID NO: 3320 (700162032H1), SEQ ID NO: 629 (700157262H1), SEQ ID NO: 1889 (700159703H1), SEQ ID NO: 2628 (700160908H1), SEQ ID NO: 1670 (700159272H1), SEQ ID NO: 1274 (700158421H1), SEQ ID NO: 1039 (700158016H1), SEQ ID NO: 1975 (700159850H1), SEQ ID NO: 2951 (700161442H1), SEQ ID NO: 1042 (700158020H1), SEQ ID NO: 1521 (700158980H1), SEQ ID NO: 1119 (700158143H1), SEQ ID NO: 277 (700156677H1), SEQ ID NO: 519 (700157072H1), SEQ ID NO: 1422 (700158672H1), SEQ ID NO: 2315 (700160405H1), SEQ ID NO: 922 (700157810H1), SEQ ID NO: 1175 (700158245H1), SEQ ID NO: 1763 (700159461H1), SEQ ID NO: 701 (700157405H1), SEQ ID NO: 2540 (700160761H1), SEQ ID NO: 1157 (700158204H1), SEQ ID NO: 576 (700157177H1), SEQ ID NO: 356 (700156801H1), SEQ ID NO: 1375 (700158585H1), SEQ ID NO: 3146 (700161738H1), SEQ ID NO: 3150 (700161744H1), SEQ ID NO: 1464 (700158854H1), SEQ ID NO: 2963 (700161457H1), SEQ ID NO: 2213 (700160236H1), SEQ ID NO: 1128 (700158158H1), SEQ ID NO: 3528 (700162450H1), SEQ ID NO: 1730 (700159395H1), SEQ ID NO: 3168 (700161775H1), SEQ ID NO: 918 (700157804H1), SEQ ID NO: 1775 (700159482H1), SEQ ID NO: 2676 (700160978H1), SEQ ID NO: 1567 (700159064H1), SEQ ID NO: 2412 (700160563H1), SEQ ID NO: 1003 (700157957H1), SEQ ID NO: 109 (700142571H1), SEQ ID NO: 1589 (700159110H1), SEQ ID NO: 508 (700157053H1), SEQ ID NO: 354 (700156792H1), SEQ ID NO: 505 (700157045H1), SEQ ID NO: 1307 (700158470H1), SEQ ID NO: 600 (700157219H1), SEQ ID NO: 1121 (700158145H1), SEQ ID NO: 1377 (700158588H1), SEQ ID NO: 2710 (700161034H1), SEQ ID NO: 1843 (700159620H2), SEQ ID NO: 998 (700157949H1), SEQ ID NO: 3564 (700162513H1), SEQ ID NO: 2708 (700161029H1), SEQ ID NO: 796 (700157593H1), SEQ ID NO: 1346 (700158541H1), SEQ ID NO: 2594 (700160860H1), SEQ ID NO: 898 (700157768H1), SEQ ID NO: 3384 (700162163H1), SEQ ID NO: 1552 (700159036H1), SEQ ID NO: 1554 (700159038H1), SEQ ID NO: 1712 (700159356H1), SEQ ID NO: 3094 (700161653H1), SEQ ID NO: 3525 (700162447H1), SEQ ID NO: 1858 (700159650H1), SEQ ID NO: 3428 (700162243H1), SEQ ID NO: 1997 (700159879H1), SEQ ID NO: 2451 (700160628H1), SEQ ID NO: 429 (700156922H1), SEQ ID NO: 1906 (700159731H1), SEQ ID NO: 2660 (700160954H1), SEQ ID NO: 1557 (700159046H1), SEQ ID NO: 2672 (700160972H1), SEQ ID NO: 1066 (700158055H1), SEQ ID NO: 3449 (700162285H1), SEQ ID NO: 1693 (700159327H1), SEQ ID NO: 601 (700157222H1), SEQ ID NO: 3527 (700162449H1), SEQ ID NO: 85 (700142532H1), SEQ ID NO: 2062 (700159989H1), SEQ ID NO: 1862 (700159656H1), SEQ ID NO: 3544 (700162472H1), SEQ ID NO: 279 (700156681H1), SEQ ID NO: 2842 (700161267H1), SEQ ID NO: 1210 (700158315H1), SEQ ID NO: 2456 (700160640H1), SEQ ID NO: 2620 (700160893H1), SEQ ID NO: 724 (700157446H1), SEQ ID NO: 615 (700157240H1), SEQ ID NO: 1694 (700159328H1), SEQ ID NO: 500 (700157039H1), SEQ ID NO: 2781 (700161170H1), SEQ ID NO: 2909 (700161381H1), SEQ ID NO: 436 (700156929H1), SEQ ID NO: 1036 (700158013H1), SEQ ID NO: 1736 (700159416H1), SEQ ID NO: 2569 (700160819H1), SEQ ID NO: 3313 (700162020H1), SEQ ID NO: 1073 (700158065H1), SEQ ID NO: 1990 (700159869H1), SEQ ID NO: 88 (700142539H1), SEQ ID NO: 1704 (700159347H1), SEQ ID NO: 1158 (700158205H1), SEQ ID NO: 3586 (700162548H1), SEQ ID NO: 1901 (700159724H1), SEQ ID NO: 1994 (700159875H1), SEQ ID NO: 3142 (700161734H1), SEQ ID NO: 2907 (700161378H1), SEQ ID NO: 1937 (700159776H1), SEQ ID NO: 2767 (700161143H1), SEQ ID NO: 2032 (700159941H1), SEQ ID NO: 3099 (700161661H1), SEQ ID NO: 2828 (700161245H1), SEQ ID NO: 437 (700156933H1), SEQ ID NO: 2985 (700161490H1), SEQ ID NO: 2499 (700160691H1), SEQ ID NO: 2336 (700160436H1), SEQ ID NO: 1074 (700158066H1), SEQ ID NO: 2073 (700160007H1), SEQ ID NO: 2956 (700161448H1), SEQ ID NO: 1089 (700158086H1), SEQ ID NO: 2195 (700160211H1), SEQ ID NO: 1741 (700159425H1), SEQ ID NO: 607 (700157229H1), SEQ ID NO: 2840 (700161265H1), SEQ ID NO: 2649 (700160942H1), SEQ ID NO: 1221 (700158332H1), SEQ ID NO: 1813 (700159568H1), SEQ ID NO: 1805 (700159552H1), SEQ ID NO: 285 (700156691H1), SEQ ID NO: 294 (700156709H1), SEQ ID NO: 3291 (700161979H1), SEQ ID NO: 2634 (700160921H1), SEQ ID NO: 3039 (700161567H1), SEQ ID NO: 3054 (700161589H1), SEQ ID NO: 453 (700156964H1), SEQ ID NO: 2681 (700160985H1), SEQ ID NO: 937 (700157836H1), SEQ ID NO: 1703 (700159346H1), SEQ ID NO: 2829 (700161247H1), SEQ ID NO: 3120 (700161693H1), SEQ ID NO: 552 (700157137H1), SEQ ID NO: 1431 (700158688H1), SEQ ID NO: 1806 (700159554H1), SEQ ID NO: 1814 (700159570H1), SEQ ID NO: 3308 (700162013H1), SEQ ID NO: 167 (700156463H1), SEQ ID NO: 2059 (700159986H1), SEQ ID NO: 242 (700156618H1), SEQ ID NO: 1256 (700158383H1), SEQ ID NO: 744 (700157489H1), SEQ ID NO: 1895 (700159716H1), SEQ ID NO: 440 (700156938H1), SEQ ID NO: 3217 (700161849H1), SEQ ID NO: 2831 (700161251H1), SEQ ID NO: 1015 (700157975H1), SEQ ID NO: 1366 (700158568H1), SEQ ID NO: 314 (700156740H1), SEQ ID NO: 2188 (700160195H1), SEQ ID NO: 84 (700142528H1), SEQ ID NO: 3069 (700161614H1), SEQ ID NO: 2952 (700161443H1), SEQ ID NO: 53 (700142478H1), SEQ ID NO: 1778 (700159492H1), SEQ ID NO: 1881 (700159685H1), SEQ ID NO: 1907 (700159732H1), SEQ ID NO: 614 (700157239H1), SEQ ID NO: 3395 (700162178H1), SEQ ID NO: 1312 (700158481H1), SEQ ID NO: 243 (700156621H1), SEQ ID NO: 1131 (700158163H1), SEQ ID NO: 678 (700157359H1), SEQ ID NO: 1506 (700158934H1), SEQ ID NO: 2643 (700160932H1), SEQ ID NO: 2593 (700160857H1), SEQ ID NO: 142 (700156430H1), SEQ ID NO: 2371 (700160494H1), SEQ ID NO: 925 (700157817H1), SEQ ID NO: 3041 (700161570H1), SEQ ID NO: 3050 (700161583H1), SEQ ID NO: 3079 (700161637H1), SEQ ID NO: 1245 (700158369H1), SEQ ID NO: 2309 (700160391H1), SEQ ID NO: 2713 (700161037H1), SEQ ID NO: 1289 (700158440H1), SEQ ID NO: 635 (700157268H1), SEQ ID NO: 653 (700157309H1), SEQ ID NO: 244 (700156623H1), SEQ ID NO: 338 (700156771H1), SEQ ID NO: 1406 (700158637H1), SEQ ID NO: 2941 (700161430H1), SEQ ID NO: 2516 (700160725H1), SEQ ID NO: 1945 (700159791H1), SEQ ID NO: 1485 (700158902H1), SEQ ID NO: 3045 (700161576H1), SEQ ID NO: 1271 (700158417H1), SEQ ID NO: 2786 (700161176H1), SEQ ID NO: 156 (700156447H1), SEQ ID NO: 1367 (700158574H1), SEQ ID NO: 3169 (700161776H1), SEQ ID NO: 2076 (700160012H1), SEQ ID NO: 3253 (700161917H1), SEQ ID NO: 950 (700157857H1), SEQ ID NO: 1237 (700158356H1), SEQ ID NO: 2063 (700159990H1), SEQ ID NO: 3574 (700162527H1), SEQ ID NO: 580 (700157183H1), SEQ ID NO: 2034 (700159943H1), SEQ ID NO: 892 (700157757H1), SEQ ID NO: 1096 (700158104H1), SEQ ID NO: 1883 (700159691H1), SEQ ID NO: 2966 (700161460H1), SEQ ID NO: 1632 (700159193H1), SEQ ID NO: 1811 (700159565H1), SEQ ID NO: 1803 (700159549H1), SEQ ID NO: 2390 (700160523H1), SEQ ID NO: 2329 (700160426H1), SEQ ID NO: 2835 (700161259H1), SEQ ID NO: 1428 (700158681H1), SEQ ID NO: 2016 (700159915H1), SEQ ID NO: 3487 (700162367H1), SEQ ID NO: 2699 (700161014H1), SEQ ID NO: 2694 (700161006H1), SEQ ID NO: 163 (700156456H1), SEQ ID NO: 2302 (700160381H1), SEQ ID NO: 23 (700142438H1), SEQ ID NO: 1720 (700159376H1), SEQ ID NO: 1519 (700158975H1), SEQ ID NO: 569 (700157166H1), SEQ ID NO: 3015 (700161536H1), SEQ ID NO: 521 (700157076H1), SEQ ID NO: 736 (700157474H1), SEQ ID NO: 626 (700157256H1), SEQ ID NO: 1846 (700159627H2), SEQ ID NO: 1642 (700159209H1), SEQ ID NO: 2391 (700160526H1), SEQ ID NO: 2410 (700160559H1), SEQ ID NO: 2061 (700159988H1), SEQ ID NO: 413 (700156891H1), SEQ ID NO: 1072 (700158064H1), SEQ ID NO: 1038 (700158015H1), SEQ ID NO: 1854 (700159641H2), SEQ ID NO: 143 (700156431H1), SEQ ID NO: 81 (700142524H1), SEQ ID NO: 3111 (700161679H1), SEQ ID NO: 2806 (700161213H1), SEQ ID NO: 139 (700156426H1), SEQ ID NO: 43 (700142466H1), SEQ ID NO: 185 (700156495H1), SEQ ID NO: 2524 (700160737H1), SEQ ID NO: 64 (700142494H1), SEQ ID NO: 3171 (700161778H1), SEQ ID NO: 2707 (700161028H1), SEQ ID NO: 2033 (700159942H1), SEQ ID NO: 639 (700157276H1), SEQ ID NO: 532 (700157093H1), SEQ ID NO: 3155 (700161756H1), SEQ ID NO: 1338 (700158531H1), SEQ ID NO: 575 (700157176H1), SEQ ID NO: 1177 (700158248H1), SEQ ID NO: 1099 (700158107H1), SEQ ID NO: 1861 (700159654H1), SEQ ID NO: 1832 (700159606H2), SEQ ID NO: 829 (700157650H1), SEQ ID NO: 878 (700157737H1), SEQ ID NO: 1443 (700158812H1), SEQ ID NO: 329 (700156761H1), SEQ ID NO: 3227 (700161866H1), SEQ ID NO: 851 (700157685H1), SEQ ID NO: 2728 (700161056H1), SEQ ID NO: 2854 (700161284H1), SEQ ID NO: 3547 (700162477H1), SEQ ID NO: 2393 (700160529H1), SEQ ID NO: 323 (700156754H1), SEQ ID NO: 1407 (700158638H1), SEQ ID NO: 187 (700156506H1), SEQ ID NO: 441 (700156940H1), SEQ ID NO: 1904 (700159728H1), SEQ ID NO: 1386 (700158605H1), SEQ ID NO: 3323 (700162037H1), SEQ ID NO: 2576 (700160830H1), SEQ ID NO: 1283 (700158434H1), SEQ ID NO: 2048 (700159970H1), SEQ ID NO: 2123 (700160085H1), SEQ ID NO: 2305 (700160385H1), SEQ ID NO: 1191 (700158278H1), SEQ ID NO: 1420 (700158669H1), SEQ ID NO: 335 (700156767H1), SEQ ID NO: 2889 (700161346H1), SEQ ID NO: 798 (700157601H1), SEQ ID NO: 976 (700157911H1), SEQ ID NO: 104 (700142561H1), SEQ ID NO: 1052 (700158034H1), SEQ ID NO: 1347 (700158542H1), SEQ ID NO: 1653 (700159226H1), SEQ ID NO: 958 (700157868H1), SEQ ID NO: 2252 (700160313H1), SEQ ID NO: 2181 (700160184H1), SEQ ID NO: 971 (700157895H1), SEQ ID NO: 2492 (700160684H1), SEQ ID NO: 1043 (700158021H1), SEQ ID NO: 12 (700142422H1), SEQ ID NO: 592 (700157207H1), SEQ ID NO: 3163 (700161770H1), SEQ ID NO: 3331 (700162049H1), SEQ ID NO: 2591 (700160855H1), SEQ ID NO: 2153 (700160140H1), SEQ ID NO: 1917 (700159748H1), SEQ ID NO: 2824 (700161241H1), SEQ ID NO: 3407 (700162206H1), SEQ ID NO: 1453 (700158832H1), SEQ ID NO: 2747 (700161102H1), SEQ ID NO: 2801 (700161206H1), SEQ ID NO: 1558 (700159047H1), SEQ ID NO: 2888 (700161345H1), SEQ ID NO: 1681 (700159307H1), SEQ ID NO: 2330 (700160427H1), SEQ ID NO: 1607 (700159151H1), SEQ ID NO: 1635 (700159196H1), SEQ ID NO: 2115 (700160076H1), SEQ ID NO: 656 (700157319H1), SEQ ID NO: 888 (700157751H1), SEQ ID NO: 711 (700157424H1), SEQ ID NO: 2307 (700160387H1), SEQ ID NO: 145 (700156433H1), SEQ ID NO: 1734 (700159411H1), SEQ ID NO: 342 (700156776H1), SEQ ID NO: 1842 (700159619H2), SEQ ID NO: 1360 (700158558H1), SEQ ID NO: 799 (700157605H1), SEQ ID NO: 1759 (700159454H1), SEQ ID NO: 2486 (700160678H1), SEQ ID NO: 3194 (700161816H1), SEQ ID NO: 1457 (700158839H1), SEQ ID NO: 2666 (700160964H1), SEQ ID NO: 3509 (700162417H1), SEQ ID NO: 2430 (700160593H1), SEQ ID NO: 446 (700156951H1), SEQ ID NO: 3273 (700161948H1), SEQ ID NO: 822 (700157642H1), SEQ ID NO: 1981 (700159857H1), SEQ ID NO: 1146 (700158184H1), SEQ ID NO: 3594 (700162570H1), SEQ ID NO: 2179 (700160180H1), SEQ ID NO: 1195 (700158285H1), SEQ ID NO: 3489 (700162376H1), SEQ ID NO: 2192 (700160204H1), SEQ ID NO: 3023 (700161547H1), SEQ ID NO: 363 (700156813H1), SEQ ID NO: 2498 (700160690H1), SEQ ID NO: 2491 (700160683H1), SEQ ID NO: 1875 (700159673H1), SEQ ID NO: 127 (700156407H1), SEQ ID NO: 1381 (700158596H1), SEQ ID NO: 1630 (700159187H1), SEQ ID NO: 3325 (700162042H1), SEQ ID NO: 3444 (700162277H1), SEQ ID NO: 1705 (700159348H1), SEQ ID NO: 2533 (700160750H1), SEQ ID NO: 1986 (700159864H1), SEQ ID NO: 2348 (700160459H1), SEQ ID NO: 3019 (700161541H1), SEQ ID NO: 2557 (700160795H1), SEQ ID NO: 3212 (700161842H1), SEQ ID NO: 3202 (700161826H1), SEQ ID NO: 1745 (700159435H1), SEQ ID NO: 188 (700156511H1), SEQ ID NO: 964 (700157879H1), SEQ ID NO: 3470 (700162338H1), SEQ ID NO: 3603 (700162591H1), SEQ ID NO: 2500 (700160692H1), SEQ ID NO: 2775 (700161157H1), SEQ ID NO: 2778 (700161166H1), SEQ ID NO: 1740 (700159423H1), SEQ ID NO: 1576 (700159081H1), SEQ ID NO: 3508 (700162414H1), SEQ ID NO: 3484 (700162364H1), SEQ ID NO: 1054 (700158037H1), SEQ ID NO: 4316 (700454828H1), SEQ ID NO: 4594 (700455401H1), SEQ ID NO: 4100 (700454421H1), SEQ ID NO: 5528 (700457192H1), SEQ ID NO: 5760 (700457654H1), SEQ ID NO: 3797 (700453825H1), SEQ ID NO: 5257 (700456691H1), SEQ ID NO: 3788 (700453810H1), SEQ ID NO: 4097 (700454418H1), SEQ ID NO: 5731 (700457589H1), SEQ ID NO: 5009 (700456178H1), SEQ ID NO: 4972 (700456102H1), SEQ ID NO: 5423 (700457018H1), SEQ ID NO: 4519 (700455175H1), SEQ ID NO: 4729 (700455675H1), SEQ ID NO: 5640 (700457388H1), SEQ ID NO: 6092 (700458353H1), SEQ ID NO: 4157 (700454513H1), SEQ ID NO: 6103 (700458378H1), SEQ ID NO: 3821 (700453864H1), SEQ ID NO: 4968 (700456094H1), SEQ ID NO: 4292 (700454771H1), SEQ ID NO: 5425 (700457023H1), SEQ ID NO: 5154 (700456454H1), SEQ ID NO: 5445 (700457055H1), SEQ ID NO: 5146 (700456444H1), SEQ ID NO: 4643 (700455525H1), SEQ ID NO: 5267 (700456715H1), SEQ ID NO: 4380 (700454949H1), SEQ ID NO: 3883 (700453981H1), SEQ ID NO: 5847 (700457846H1), SEQ ID NO: 4889 (700455957H1), SEQ ID NO: 5239 (700456657H1), SEQ ID NO: 5072 (700456315H1), SEQ ID NO: 6018 (700458195H1), SEQ ID NO: 5205 (700456575H1), SEQ ID NO: 5826 (700457804H1), SEQ ID NO: 4475 (700455102H1), SEQ ID NO: 5429 (700457030H1), SEQ ID NO: 5452 (700457062H1), SEQ ID NO: 5453 (700457063H1), SEQ ID NO: 4131 (700454465H1), SEQ ID NO: 5538 (700457213H1), SEQ ID NO: 5540 (700457215H1), SEQ ID NO: 5433 (700457035H1), SEQ ID NO: 3984 (700454206H1), SEQ ID NO: 5369 (700456891H1), SEQ ID NO: 5766 (700457667H1), SEQ ID NO: 5699 (700457519H1), SEQ ID NO: 5698 (700457518H1), SEQ ID NO: 5907 (700457953H1), SEQ ID NO: 5829 (700457808H1), SEQ ID NO: 5872 (700457887H1), SEQ ID NO: 4247 (700454678H1), SEQ ID NO: 5225 (700456633H1), SEQ ID NO: 4823 (700455851H1), SEQ ID NO: 4083 (700454394H1), SEQ ID NO: 4084 (700454395H1), SEQ ID NO: 4030 (700454295H1), SEQ ID NO: 5636 (700457380H1), SEQ ID NO: 4784 (700455780H1), SEQ ID NO: 5925 (700457993H1), SEQ ID NO: 6119 (700458416H1), SEQ ID NO: 6124 (700458424H1), SEQ ID NO: 4463 (700455081H1), SEQ ID NO: 5554 (700457243H1), SEQ ID NO: 5497 (700457136H1), SEQ ID NO: 5602 (700457326H1), SEQ ID NO: 5651 (700457411H1), SEQ ID NO: 4522 (700455178H1), SEQ ID NO: 5647 (700457403H1), SEQ ID NO: 5426 (700457025H1), SEQ ID NO: 5395 (700456958H1), SEQ ID NO: 5422 (700457017H1), SEQ ID NO: 6127 (700458428H1), SEQ ID NO: 6121 (700458420H1), SEQ ID NO: 6128 (700458429H1), SEQ ID NO: 4915 (700456004H1), SEQ ID NO: 5183 (700456520H1), SEQ ID NO: 5179 (700456505H1), SEQ ID NO: 5480 (700457107H1), SEQ ID NO: 6070 (700458311H1), SEQ ID NO: 4263 (700454707H1), SEQ ID NO: 4325 (700454841H1), SEQ ID NO: 5552 (700457241H1), SEQ ID NO: 6241 (700458630H1), SEQ ID NO: 4853 (700455908H1), SEQ ID NO: 5088 (700456339H1), SEQ ID NO: 5082 (700456331H1), SEQ ID NO: 4419 (700455012H1), SEQ ID NO: 5131 (700456416H1), SEQ ID NO: 4417 (700455010H1), SEQ ID NO: 4137 (700454471H1), SEQ ID NO: 4786 (700455782H1), SEQ ID NO: 5221 (700456626H1), SEQ ID NO: 4095 (700454414H1), SEQ ID NO: 4453 (700455062H1), SEQ ID NO: 5253 (700456683H1), SEQ ID NO: 4588 (700455290H1), SEQ ID NO: 4456 (700455068H1), SEQ ID NO: 4428 (700455024H1), SEQ ID NO: 3825 (700453874H1), SEQ ID NO: 4686 (700455610H1), SEQ ID NO: 4711 (700455650H1), SEQ ID NO: 4067 (700454365H1), SEQ ID NO: 4436 (700455038H1), SEQ ID NO: 6010 (700458175H1), SEQ ID NO: 4256 (700454692H1), SEQ ID NO: 5474 (700457092H1), SEQ ID NO: 4656 (700455554H1), SEQ ID NO: 4832 (700455867H1), SEQ ID NO: 5744 (700457627H1), SEQ ID NO: 5226 (700456634H1), SEQ ID NO: 4529 (700455189H1), SEQ ID NO: 5471 (700457085H1), SEQ ID NO: 5451 (700457061H1), SEQ ID NO: 5828 (700457807H1), SEQ ID NO: 5771 (700457674H1), SEQ ID NO: 4957 (700456074H1), SEQ ID NO: 4985 (700456127H1), SEQ ID NO: 4981 (700456114H1), SEQ ID NO: 3971 (700454173H1), SEQ ID NO: 4060 (700454351H1), SEQ ID NO: 4734 (700455681H1), SEQ ID NO: 5136 (700456423H1), SEQ ID NO: 5680 (700457471H1), SEQ ID NO: 5980 (700458123H1), SEQ ID NO: 3940 (700454119H1), SEQ ID NO: 3866 (700453958H1), SEQ ID NO: 5861 (700457867H1), SEQ ID NO: 3836 (700453895H1), SEQ ID NO: 5458 (700457072H1), SEQ ID NO: 4366 (700454923H1), SEQ ID NO: 4211 (700454614H1), SEQ ID NO: 6273 (700458684H1), SEQ ID NO: 5875 (700457891H1), SEQ ID NO: 5140 (700456433H1), SEQ ID NO: 5986 (700458136H1), SEQ ID NO: 6262 (700458668H1), SEQ ID NO: 5247 (700456675H1), SEQ ID NO: 5721 (700457565H1), SEQ ID NO: 4531 (700455195H1), SEQ ID NO: 5577 (700457273H1), SEQ ID NO: 4399 (700454984H1), SEQ ID NO: 6072 (700458313H1), SEQ ID NO: 4442 (700455048H1), SEQ ID NO: 4078 (700454381H1), SEQ ID NO: 4751 (700455713H1), SEQ ID NO: 5790 (700457717H1), SEQ ID NO: 5406 (700456977H1), SEQ ID NO: 4532 (700455196H1), SEQ ID NO: 4012 (700454262H1), SEQ ID NO: 5556 (700457245H1), SEQ ID NO: 5262 (700456707H1), SEQ ID NO: 4900 (700455974H1), SEQ ID NO: 5290 (700456752H1), SEQ ID NO: 3957 (700454145H1), SEQ ID NO: 6291 (700458826H1), SEQ ID NO: 6292 (700458827H1), SEQ ID NO: 4639 (700455517H1), SEQ ID NO: 6137 (700458443H1), SEQ ID NO: 4367 (700454925H1), SEQ ID NO: 4467 (700455085H1), SEQ ID NO: 5473 (700457090H1), SEQ ID NO: 5482 (700457115H1), SEQ ID NO: 4266 (700454717H1), SEQ ID NO: 4272 (700454725H1), SEQ ID NO: 4356 (700454909H1), SEQ ID NO: 4135 (700454469H1), SEQ ID NO: 5259 (700456694H1), SEQ ID NO: 5736 (700457604H1), SEQ ID NO: 5114 (700456381H1), SEQ ID NO: 5656 (700457419H1), SEQ ID NO: 4512 (700455167H1), SEQ ID NO: 4460 (700455077H1), SEQ ID NO: 4553 (700455237H1), SEQ ID NO: 4373 (700454937H1), SEQ ID NO: 4400 (700454985H1), SEQ ID NO: 5379 (700456917H1), SEQ ID NO: 5678 (700457466H1), SEQ ID NO: 5746 (700457629H1), SEQ ID NO: 5152 (700456452H1), SEQ ID NO: 5133 (700456418H1), SEQ ID NO: 4908 (700455987H1), SEQ ID NO: 5650 (700457409H1), SEQ ID NO: 6060 (700458287H1), SEQ ID NO: 6011 (700458178H1), SEQ ID NO: 4271 (700454724H1), SEQ ID NO: 5489 (700457124H1), SEQ ID NO: 5762 (700457658H1), SEQ ID NO: 4068 (700454366H1), SEQ ID NO: 4075 (700454377H1), SEQ ID NO: 3910 (700454049H1), SEQ ID NO: 4394 (700454970H1), SEQ ID NO: 5450 (700457060H1), SEQ ID NO: 5719 (700457561H1), SEQ ID NO: 5763 (700457660H1), SEQ ID NO: 4725 (700455669H1), SEQ ID NO: 4003 (700454241H1), SEQ ID NO: 5487 (700457122H1), SEQ ID NO: 5264 (700456711H1), SEQ ID NO: 5850 (700457850H1), SEQ ID NO: 5501 (700457141H1), SEQ ID NO: 4085 (700454396H1), SEQ ID NO: 4091 (700454409H1), SEQ ID NO: 4404 (700454989H1), SEQ ID NO: 5390 (700456948H1), SEQ ID NO: 5751 (700457638H1), SEQ ID NO: 4914 (700456003H1), SEQ ID NO: 6035 (700458234H1), SEQ ID NO: 6078 (700458322H1), SEQ ID NO: 5893 (700457927H1), SEQ ID NO: 5309 (700456784H1), SEQ ID NO: 4539 (700455212H1), SEQ ID NO: 5551 (700457240H1), SEQ ID NO: 5522 (700457174H1), SEQ ID NO: 5486 (700457121H1), SEQ ID NO: 4478 (700455106H1), SEQ ID NO: 4139 (700454474H1), SEQ ID NO: 5938 (700458026H1), SEQ ID NO: 6329 (700458889H1), SEQ ID NO: 5155 (700456455H1), SEQ ID NO: 5883 (700457911H1), SEQ ID NO: 3873 (700453966H1), SEQ ID NO: 4652 (700455543H1), SEQ ID NO: 4425 (700455021H1), SEQ ID NO: 4406 (700454992H1), SEQ ID NO: 6084 (700458339H1), SEQ ID NO: 3644 (700405359H1), SEQ ID NO: 5258 (700456692H1), SEQ ID NO: 4088 (700454405H1), SEQ ID NO: 3976 (700454186H1), SEQ ID NO: 4054 (700454337H1), SEQ ID NO: 4704 (700455637H1), SEQ ID NO: 3707 (700405462H1), SEQ ID NO: 6165 (700458510H1), SEQ ID NO: 6058 (700458285H1), SEQ ID NO: 4275 (700454729H1), SEQ ID NO: 3755 (700453757H1), SEQ ID NO: 5566 (700457256H1), SEQ ID NO: 4545 (700455226H1), SEQ ID NO: 4144 (700454483H1), SEQ ID NO: 5216 (700456614H1), SEQ ID NO: 4490 (700455127H1), SEQ ID NO: 5278 (700456729H1), SEQ ID NO: 5260 (700456695H1), SEQ ID NO: 5157 (700456458H1), SEQ ID NO: 5483 (700457116H1), SEQ ID NO: 4032 (700454303H1), SEQ ID NO: 5709 (700457540H1), SEQ ID NO: 4125 (700454456H1), SEQ ID NO: 4503 (700455152H1), SEQ ID NO: 4567 (700455262H1), SEQ ID NO: 5442 (700457051H1), SEQ ID NO: 5573 (700457266H1), SEQ ID NO: 5531 (700457202H1), SEQ ID NO: 4031 (700454302H1), SEQ ID NO: 5381 (700456920H1), SEQ ID NO: 6257 (700458655H1), SEQ ID NO: 4322 (700454836H1), SEQ ID NO: 6059 (700458286H1), SEQ ID NO: 5090 (700456344H1), SEQ ID NO: 4920 (700456014H1), SEQ ID NO: 4555 (700455240H1), SEQ ID NO: 6046 (700458257H1), SEQ ID NO: 3985 (700454209H1), SEQ ID NO: 3988 (700454213H1), SEQ ID NO: 5163 (700456469H1), SEQ ID NO: 5791 (700457720H1), SEQ ID NO: 4363 (700454917H1), SEQ ID NO: 4474 (700455101H1), SEQ ID NO: 4337 (700454859H1), SEQ ID NO: 4340 (700454864H1), SEQ ID NO: 3786 (700453808H1), SEQ ID NO: 3686 (700405427H1), SEQ ID NO: 5691 (700457504H1), SEQ ID NO: 4059 (700454350H1), SEQ ID NO: 4038 (700454313H1), SEQ ID NO: 4039 (700454314H1), SEQ ID NO: 5147 (700456445H1), SEQ ID NO: 4376 (700454942H1), SEQ ID NO: 3997 (700454229H1), SEQ ID NO: 3892 (700454004H1), SEQ ID NO: 5747 (700457630H1), SEQ ID NO: 4835 (700455873H1), SEQ ID NO: 3941 (700454121H1), SEQ ID NO: 3990 (700454221H1), SEQ ID NO: 5011 (700456186H1), SEQ ID NO: 5411 (700456986H1), SEQ ID NO: 5904 (700457948H1), SEQ ID NO: 5642 (700457392H1), SEQ ID NO: 4098 (700454419H1), SEQ ID NO: 5803 (700457750H1), SEQ ID NO: 4955 (700456069H1), SEQ ID NO: 5251 (700456679H1), SEQ ID NO: 6017 (700458194H1), SEQ ID NO: 4159 (700454516H1), SEQ ID NO: 4514 (700455169H1), SEQ ID NO: 5271 (700456720H1), SEQ ID NO: 4426 (700455022H1), SEQ ID NO: 4409 (700454996H1), SEQ ID NO: 4559 (700455247H1), SEQ ID NO: 5472 (700457088H1), SEQ ID NO: 3638 (700405352H1), SEQ ID NO: 5283 (700456741H1), SEQ ID NO: 5781 (700457692H1), SEQ ID NO: 5628 (700457367H1), SEQ ID NO: 5076 (700456324H1), SEQ ID NO: 5890 (700457924H1), SEQ ID NO: 4299 (700454785H1), SEQ ID NO: 3740 (700453730H1), SEQ ID NO: 5761 (700457656H1), SEQ ID NO: 5765 (700457663H1), SEQ ID NO: 4699 (700455630H1), SEQ ID NO: 4346 (700454880H1), SEQ ID NO: 6038 (700458240H1), SEQ ID NO: 4564 (700455257H1), SEQ ID NO: 5895 (700457929H1), SEQ ID NO: 5646 (700457402H1), SEQ ID NO: 4666 (700455575H1), SEQ ID NO: 4665 (700455574H1), SEQ ID NO: 3931 (700454106H1), SEQ ID NO: 4089 (700454406H1), SEQ ID NO: 3953 (700454139H1), SEQ ID NO: 3932 (700454107H1), SEQ ID NO: 3901 (700454033H1), SEQ ID NO: 3890 (700453995H1), SEQ ID NO: 5558 (700457247H1), SEQ ID NO: 4863 (700455922H1), SEQ ID NO: 3841 (700453912H1), SEQ ID NO: 6215 (700458576H1), SEQ ID NO: 4495 (700455139H1), SEQ ID NO: 5560 (700457250H1), SEQ ID NO: 3989 (700454219H1), SEQ ID NO: 6114 (700458404H1), SEQ ID NO: 5189 (700456528H1), SEQ ID NO: 5722 (700457568H1), SEQ ID NO: 4563 (700455255H1), SEQ ID NO: 6040 (700458242H1), SEQ ID NO: 5547 (700457230H1), SEQ ID NO: 4104 (700454426H1), SEQ ID NO: 4681 (700455604H1), SEQ ID NO: 6322 (700458877H1), SEQ ID NO: 3608 (700405305H1), SEQ ID NO: 4261 (700454705H1), SEQ ID NO: 5308 (700456783H1), SEQ ID NO: 5178 (700456503H1), SEQ ID NO: 3758 (700453762H1), SEQ ID NO: 3756 (700453759H1), SEQ ID NO: 3708 (700405463H1), SEQ ID NO: 5243 (700456663H1), SEQ ID NO: 6202 (700458557H1), SEQ ID NO: 6196 (700458549H1), SEQ ID NO: 5339 (700456844H1), SEQ ID NO: 4568 (700455263H1), SEQ ID NO: 5608 (700457336H1), SEQ ID NO: 4939 (700456049H1), SEQ ID NO: 5546 (700457225H1), SEQ ID NO: 5416 (700457006H1), SEQ ID NO: 5911 (700457961H1), SEQ ID NO: 5007 (700456175H1), SEQ ID NO: 5564 (700457254H1), SEQ ID NO: 5565 (700457255H1), SEQ ID NO: 5848 (700457848H1), SEQ ID NO: 4670 (700455579H1), SEQ ID NO: 5388 (700456942H1), SEQ ID NO: 4820 (700455846H1), SEQ ID NO: 5806 (700457760H1), SEQ ID NO: 5873 (700457888H1), SEQ ID NO: 5955 (700458063H1), SEQ ID NO: 5161 (700456463H1), SEQ ID NO: 4117 (700454445H1), SEQ ID NO: 5475 (700457093H1), SEQ ID NO: 3835 (700453894H1), SEQ ID NO: 3881 (700453979H1), SEQ ID NO: 5289 (700456751H1), SEQ ID NO: 4687 (700455611H1), SEQ ID NO: 5778 (700457688H1), SEQ ID NO: 5663 (700457434H1), SEQ ID NO: 6140 (700458451H1), SEQ ID NO: 4441 (700455046H1), SEQ ID NO: 4824 (700455853H1), SEQ ID NO: 3827 (700453878H1), SEQ ID NO: 4130 (700454464H1), SEQ ID NO: 4110 (700454435H1), SEQ ID NO: 5793 (700457726H1), SEQ ID NO: 5506 (700457147H1), SEQ ID NO: 6164 (700458509H1), SEQ ID NO: 4048 (700454329H1), SEQ ID NO: 5424 (700457020H1), SEQ ID NO: 5420 (700457012H1), SEQ ID NO: 6151 (700458468H1), SEQ ID NO: 4947 (700456059H1), SEQ ID NO: 4352 (700454902H1), SEQ ID NO: 6111 (700458395H1), SEQ ID NO: 6220 (700458587H1), SEQ ID NO: 6234 (700458616H1), SEQ ID NO: 4560 (700455252H1), SEQ ID NO: 4392 (700454967H1), SEQ ID NO: 4881 (700455944H1), SEQ ID NO: 4929 (700456036H1), SEQ ID NO: 5568 (700457258H1), SEQ ID NO: 5570 (700457260H1), SEQ ID NO: 5545 (700457223H1), SEQ ID NO: 4523 (700455179H1), SEQ ID NO: 5750 (700457637H1), SEQ ID NO: 4873 (700455936H1), SEQ ID NO: 6186 (700458537H1), SEQ ID NO: 6198 (700458552H1), SEQ ID NO: 5414 (700456994H1), SEQ ID NO: 5799 (700457740H1), SEQ ID NO: 5669 (700457445H1), SEQ ID NO: 5754 (700457644H1), SEQ ID NO: 4640 (700455518H1), SEQ ID NO: 3785 (700453807H1), SEQ ID NO: 6245 (700458639H1), SEQ ID NO: 3844 (700453919H1), SEQ ID NO: 3682 (700405418H1), SEQ ID NO: 3627 (700405340H1), SEQ ID NO: 5005 (700456169H1), SEQ ID NO: 4948 (700456061H1), SEQ ID NO: 4355 (700454907H1), SEQ ID NO: 4894 (700455964H1), SEQ ID NO: 5485 (700457120H1), SEQ ID NO: 4586 (700455286H1), SEQ ID NO: 4410 (700455001H1), SEQ ID NO: 4375 (700454941H1), SEQ ID NO: 4251 (700454684H1), SEQ ID NO: 6278 (700458802H1), SEQ ID NO: 4880 (700455943H1), SEQ ID NO: 5092 (700456346H1), SEQ ID NO: 4830 (700455863H1), SEQ ID NO: 4827 (700455858H1), SEQ ID NO: 5219 (700456619H1), SEQ ID NO: 5629 (700457371H1), SEQ ID NO: 5404 (700456971H1), SEQ ID NO: 4525 (700455183H1), SEQ ID NO: 4312 (700454820H1), SEQ ID NO: 3860 (700453944H1), SEQ ID NO: 5676 (700457457H1), SEQ ID NO: 5673 (700457451H1), SEQ ID NO: 5915 (700457969H1), SEQ ID NO: 5108 (700456369H1), SEQ ID NO: 4115 (700454443H1), SEQ ID NO: 4518 (700455174H1), SEQ ID NO: 4359 (700454913H1), SEQ ID NO: 5493 (700457130H1), SEQ ID NO: 4057 (700454344H1), SEQ ID NO: 4975 (700456105H1), SEQ ID NO: 3803 (700453835H1), SEQ ID NO: 3799 (700453827H1), SEQ ID NO: 4953 (700456066H1), SEQ ID NO: 5672 (700457449H1), SEQ ID NO: 4290 (700454767H1), SEQ ID NO: 3742 (700453733H1), SEQ ID NO: 6290 (700458825H1), SEQ ID NO: 6248 (700458643H1). These selected cdps represent unique, corn seedling-specific polynucleotides which are used to produce a seedling-specific profile of gene transcription, a transcript image.

[0022] The cdps are also used as a composition in methods to detect altered gene expression in inbred or hybrid plants. Such methods employ the cdps of the Sequence Listing, oligonucleotides, fragments, derivatives, or complementary sequences in hybridization technologies. The invention provides a method for detecting polynucleotides in a biological sample, the method comprising the steps of hybridizing a cdp to at least one of the nucleic acids in the biological sample, thereby forming a hybridization complex, and detecting the hybridization complex, wherein the presence of the complex correlates with the presence of the polynucleotide in the sample. An additional method provides for amplification of the nucleic acids of the biological sample prior to hybridization. The invention provides a method of screening a plurality of molecules for specific binding to a polynucleotide, the method comprising the steps of providing the plurality of molecules; combining the polynucleotide with each of the plurality of molecules for a time sufficient to allow binding under suitable conditions; and detecting binding of the polynucleotide to each of the plurality of molecules, thereby identifying the molecules which specifically bind the polynucleotide.

[0023] The invention further provides a method for recovering a regulatory element, the method comprising the steps of designing oligomers to at least one of the cdps, combining the oligomers with a DNA library under appropriate conditions to amplify the cdp, comparing the cdp with the amplified sequence to identify overlapping areas, identifying additional sequence beyond the overlapping areas, and repeating steps a) through d) until the regulatory element is recovered. The regulatory element is a seedling-specific regulatory element which may be placed in an expression vector which is transformed into a corn plant. The regulatory element is of value in regulating the expression of introduced cdps.

[0024] The invention provides a purified corn seedling-derived polynucleotide capable of expressing a corn seedling-derived polypeptide. In one embodiment, the corn seedling-derived polynucleotide is contained within an expression vector. In a second embodiment, the expression vector is contained within a host cell. The invention also provides a method for producing a corn seedling-derived polypeptide, said method comprising the steps of culturing the host cells containing the seedling-derived polynucleotide under conditions suitable for the expression of a corn seedling-derived polypeptide, and recovering the corn seedling-derived polypeptide from the cell culture.

[0025] The invention provides a purified corn seedling-derived polypeptide (CDP) encoded by at least one of the cdps of the Sequence Listing. The invention also provides an anti-CDP antibody specific for a purified polypeptide encoded by the cdp. Such antibodies may be used for diagnostic purposes for the detection of CDPs in specific plant cells.

[0026] The invention further provides a method for identifying a test compound which specifically binds the CDP, the method comprising the steps of providing a test compound, combining the CDP with the test compound under suitable conditions for a time sufficient to allow binding, and detecting CDP binding to the test compound.

### DESCRIPTION OF THE SEQUENCE LISTING AND TABLES

[0027] A portion of the disclosure of this patent document contains material which is subject to copyright protection. The copyright owner has no objection to the facsimile reproduction by anyone of the patent document or the patent disclosure, as it appears in the Patent and Trademark Office patent file or records, but otherwise reserves all copyright rights whatsoever.

[0028] The Sequence Listing is a compilation of nucleic acid sequences obtained by sequencing clone inserts or isolates of two corn seedling cDNA libraries. Each sequence is identified by a sequence identification number (SEQ ID NO) and by an Incyte Clone number. TABLES 1 and 2 are compilations of Incyte Clones arranged as described below.

[0029] TABLE 1 lists homologous isolates from the two corn seedling cDNA libraries prepared as described in the Examples. The first column contains Incyte Clone numbers. The Incyte Clone number provides a cross reference to the Sequence Listing. The second column contains a relevant GenBank identification number. The third and fourth columns represent product and log-likelihood scores (Karlin, S. and S. F. Altschul (1993) Proc. Nat. Acad. Sci. 90:5873-5877). The fifth column refers to the particular database and release of GenBank against which the Incyte Clone was searched and in which a related sequence was found. The sequences of this invention were compared to sequences in the GenBank plant, eukaryotic and protein databases, and most isolates list homology to sequences in those databases. The last column contains a description of the referenced GenBank sequence.

[0030] TABLE 2 is a compilation representing corn seedling-specific gene activity as illustrated by sets of clustered or related sequences. Each cluster disclosed in the table contains unique or homologous sequences that are specific to the two corn seedling cDNA libraries. The clones in a cluster may contain overlapping sequences or they may be related to or overlap a common reference sequence. Clusters are compiled by naming, matching, and counting all copies of the cdp. The minimum number of clones required to define a cluster is two; clusters containing two clones are found at the bottom of the table. Some clusters are characterized further by the homology of one or more sequences to a reference sequence which has a GenBank identifier (g) and description. Homologous sequences are more fully described in TABLE 1.

### DETAILED DESCRIPTION OF THE INVENTION

[0031] Before the nucleic acid sequences and methods are presented, it is to be understood that this invention is not limited to the particular methodologies, protocols, cell lines, vectors, and reagents described. Although particular embodiments are described, methods and materials similar or equivalent to these embodiments may be used to practice the invention. The preferred methods, devices, and materials set forth are not intended to limit the scope of the invention which is limited only by the appended claims.

[0032] The singular forms “a”, “an”, and “the” include plural reference unless the context clearly dictates otherwise. All technical and scientific terms have the meanings commonly understood by one of ordinary skill in the art. All publications are incorporated by reference for the purpose of describing and disclosing the cell lines, vectors, and methodologies which are presented and which might be used in connection with the invention. Nothing in the specification is to be construed as an admission that the invention is not entitled to antedate such disclosure by virtue of prior invention.

### Definitions

[0033] As used herein, the lower case “cdp” refers to a nucleic acid sequence, while the upper case “CDP” refers to an amino acid sequence. A “full-length” cdp refers to a nucleic acid sequence containing the entire coding region of a gene endogenously expressed in corn.

[0034] “Adjuvants” are materials such as Freund's, mineral gels (aluminum hydroxide), and surface active substances (lysolecithin, pluronic polyols, polyanions, peptides, oil emulsions, keyhole limpet hemocyanin (KLH; Sigma-Aldrich, St. Louis MO.), and dinitrophenol) which may be administered to increase a host's immunological response.

[0035] “Allele” refers to an alternative form of a nucleic acid sequence. Alleles result from a “mutation”, and any given genome may have none, one, or many allelic forms. Mutations which give rise to alleles are ascribed to deletions, additions or substitutions of nucleotides. Each of these types of changes may occur alone, or in combination with the others, one or more times in a given nucleic acid sequence. The present invention encompasses allelic cdps.

[0036] “Amino acid sequence” refers to an oligopeptide, a peptide, a polypeptide, or a protein of either natural or synthetic origin. The amino acid sequence is not limited to the complete, endogenous amino acid sequence and may be a portion, epitope, variant, or derivative of a protein expressed by a corn nucleic acid sequence.

[0037] “Amplification” refers to the production of additional copies of a sequence and is carried out using polymerase chain reaction (PCR) technologies well known in the art.

[0038] “Antisense” refers to nucleic acid sequences which are complementary to a specific DNA or RNA sequence. The antisense strand (negative or 3′-5′) is that nucleic acid strand that is complementary to the sense strand (positive or 5′-3′).

[0039] “Biologically active” refers to a peptide having a structural, regulatory biochemical, or immunological function of a naturally occurring peptide.

[0040] “Complementary” refers to the natural association of nucleic acid sequences by base-pairing (A-G-T pairs with its complement T-C-A). Complementarity between two single-stranded molecules may be partial or complete. The degree to which two sequences are complementary affects the efficiency of hybridization and amplification reactions.

[0041] “Derivative” refers to the chemical modification of a nucleic acid sequence by replacement of hydrogen by an alkyl, acyl, amino, or other group.

[0042] “Homology” refers to sequence similarity either between a reference nucleic acid sequence and at least a fragment of a cdp or between a reference amino acid sequence and a portion of a CDP.

[0043] “Hybridization” refers to the process by which a strand of nucleic acid joins with a complementary strand through base pairing.

[0044] “Immunogenic” defines the capability of a natural, recombinant or synthetic oligopeptide, or polypeptide, to induce antibody production in appropriate animals or cells.

[0045] “Labeling” refers to the covalent or noncovalent joining of a polynucleotide, polypeptide or antibody with a reporter molecule that provides for a detectable and often measurable signal.

[0046] “Linkers” are short stretches of nucleotide sequence which may be added onto a vector or a cdp to create restriction endonuclease sites for ease in cloning. “Polylinkers” are engineered to include multiple restriction enzyme sites and provide for the use of both those enzymes which leave 5′ and 3′ overhangs (such as BamHI, EcoRI, and HindIII) or which provide a blunt end (such as EcoRV, SnaBI, and StuI).

[0047] “Naturally occurring” refers to an endogenous polynucleotide or polypeptide that may be isolated from viruses or prokaryotic or eukaryotic cells.

[0048] “Nucleic acid sequence” refers to an oligomer, oligonucleotide, nucleotide or polynucleotide, and its fragments, and to DNA or RNA of genomic or synthetic origin which may be single- or double-stranded and represent the sense or complementary (antisense) strand.

[0049] “Oligomer” refers to a nucleic acid sequence of at least about 10 nucleotides and as many as about 60 nucleotides, preferably about 15 to 30 nucleotides, that may be used as a primer or amplimer in amplification technologies. Oligomers are usually chemically synthesized.

[0050] “Peptide nucleic acid” (PNA) refers to an oligomer of at least six nucleotides to which an amino acid residue, such as lysine, and an amino group have been added. PNAs, also designated antigene agents, stop transcript elongation by binding to their complementary strand of nucleic acid.

[0051] “Plant sample” refers to a cell, chromosomes isolated from a cell, genomic DNA, RNA, or cDNA in solution or bound to a substrate; an extract from plant cells, a cleared tissue, a blot or imprint from the cut edge of a plant part, or the like.

[0052] A “portion” of an CDP may be selected based upon retention of biological or immunological characteristics shared with naturally occurring polypeptides derived from corn seedling. For example, an antigenic portion of a CDP may be used to induce antibody in an appropriate host.

[0053] “Post-translational modification” of a CDP may involve lipidation, glycosylation, phosphorylation, acetylation, racemization, proteolytic cleavage, and the like. These processes may occur synthetically or biochemically. Biochemical modifications will vary by cell type depending on the enzymatic milieu and the CDP.

[0054] “Probe” refers to cdps or fragments thereof, which are used to detect identical, allelic or related nucleic acid sequences.

[0055] “Purified” refers to molecules, either polynucleotides or polypeptides that are isolated or separated from their natural environment and are at least 60% free, preferably 75% free, and most preferably 90% free from other compounds with which they are naturally associated.

[0056] “Regulatory element” refers to a nucleic acid sequence from nontranslated regions of a gene such as enhancers, promoters, introns, and 3′ untranslated regions which interact with host proteins to carry out transcription or translation.

[0057] “Reporter” molecules are chemical or biochemical moieties used for labeling a nucleic acid, an amino acid, or an antibody. They include radionuclides; enzymes; fluorescent, chemiluminescent, or chromogenic agents; substrates; cofactors; inhibitors; magnetic particles; and the like.

[0058] “Substrate” refers to any suitable rigid or semi-rigid support including membranes, filters, chips, slides, wafers, fibers, magnetic or nonmagnetic beads, gels, capillaries or other tubing, plates, polymers, and microparticles. The substrate can have a variety of surface forms, such as wells, trenches, pins, channels and pores, to which the polynucleotides are bound.

[0059] “Transformation” refers to a process by which exogenous DNA enters and changes a recipient cell. It may occur under natural or artificial conditions using various methods well known in the art. Transformation may rely on any known method for the insertion of foreign nucleic acid sequences into a prokaryotic or eukaryotic host cell. The method is selected based on the host cell being transformed. Transformants include stably transformed cells in which the inserted DNA is capable of replication either as an autonomously replicating plasmid or as part of the host chromosome, as well as cells which transiently express the inserted DNA or RNA.

[0060] “Variant” refers to an amino acid sequence which differs from another sequence by at least one amino acid. The variant may have “conservative” changes (e.g. replacement of leucine with isoleucine), which does not affect structural or chemical properties; or more rarely, “nonconservative” changes (e.g. replacement of glycine with tryptophan), which may affect structural and/or chemical properties.

### THE INVENTION

[0061] In a particular embodiment, mRNA was isolated from corn seedling and used to construct the SATMON012 and SATMON029 cDNA libraries. The invention relates to nucleic acid sequences comprising corn seedling-derived polynucleotides (cdps) as presented in the Sequence Listing and to the use of these nucleic acid sequences. A “corn seedling-derived polynucleotide” refers to a cdp which may be naturally occurring, recombinant, synthetic, or semi-synthetic. A subset of clustered seedling-specific cdps is given in TABLE 2. The cdps may be used to identify, isolate, or extend identical or related corn seedling nucleic acid sequences from DNA libraries for the purpose of producing an entire coding region or recovering a regulatory element. The cdps may also be used in nucleic acid hybridization or amplification technologies to follow expression of desirable traits through plant breeding programs. The present invention provides for expression vectors and host cells containing nucleic acid sequences that encode CDPs or portions thereof and regulatory elements obtained using methods described herein. The CDPs may possess biological or immunological activity, or both. The invention provides for the use of purified CDPs to induce antibodies for diagnostic use and to identify test compounds which specifically bind the CDP.

[0062] Specifically, the present invention relates to the following subset of unique and seedling-specific cdps whose transcripts occurred more than once in the two corn seedling cDNA library. They are SEQ ID NO: 3537 (700162463H1), SEQ ID NO: 1161 (700158211H1), SEQ ID NO: 949 (700157856H1), SEQ ID NO: 3199 (700161822H1), SEQ ID NO: 1744 (700159434H1), SEQ ID NO: 1183 (700158258H1), SEQ ID NO: 377 (700156836H1), SEQ ID NO: 2501 (700160693H1), SEQ ID NO: 2527 (700160740H1), SEQ ID NO: 698 (700157394H1), SEQ ID NO: 2335 (700160435H1), SEQ ID NO: 1988 (700159867H1), SEQ ID NO: 2583 (700160844H1), SEQ ID NO: 585 (700157190H1), SEQ ID NO: 237 (700156608H1), SEQ ID NO: 2719 (700161045H1), SEQ ID NO: 266 (700156661H1), SEQ ID NO: 3021 (700161544H1), SEQ ID NO: 2040 (700159955H1), SEQ ID NO: 2224 (700160253H1), SEQ ID NO: 2761 (700161134H1), SEQ ID NO: 1166 (700158229H1), SEQ ID NO: 1164 (700158222H1), SEQ ID NO: 2479 (700160669H1), SEQ ID NO: 215 (700156563H1), SEQ ID NO: 2448 (700160623H1), SEQ ID NO: 2207 (700160227H1), SEQ ID NO: 2626 (700160906H1), SEQ ID NO: 1339 (700158532H1), SEQ ID NO: 2726 (700161054H1), SEQ ID NO: 336 (700156768H1), SEQ ID NO: 1963 (700159826H1), SEQ ID NO: 2285 (700160357H1), SEQ ID NO: 1969 (700159839H1), SEQ ID NO: 471 (700156989H1), SEQ ID NO: 3118 (700161689H1), SEQ ID NO: 2475 (700160665H1), SEQ ID NO: 2731 (700161064H1), SEQ ID NO: 1695 (700159330H1), SEQ ID NO: 35 (700142454H1), SEQ ID NO: 79 (700142522H1), SEQ ID NO: 2086 (700160030H1), SEQ ID NO: 2000 (700159882H1), SEQ ID NO: 1001 (700157954H1), SEQ ID NO: 1302 (700158460H1), SEQ ID NO: 1205 (700158305H1), SEQ ID NO: 2849 (700161279H1), SEQ ID NO: 2138 (700160112H1), SEQ ID NO: 224 (700156580H1), SEQ ID NO: 385 (700156847H1), SEQ ID NO: 3541 (700162468H1), SEQ ID NO: 3526 (700162448H1), SEQ ID NO: 2137 (700160111H1), SEQ ID NO: 1197 (700158287H1), SEQ ID NO: 2109 (700160067H1), SEQ ID NO: 1902 (700159726H1), SEQ ID NO: 2578 (700160832H1), SEQ ID NO: 1044 (700158022H1), SEQ ID NO: 956 (700157865H1), SEQ ID NO: 149 (700156439H1), SEQ ID NO: 1548 (700159028H1), SEQ ID NO: 3030 (700161557H1), SEQ ID NO: 2128 (700160091H1), SEQ ID NO: 3025 (700161550H1), SEQ ID NO: 195 (700156524H1), SEQ ID NO: 1385 (700158604H1), SEQ ID NO: 1091 (700158090H1), SEQ ID NO: 1517 (700158965H1), SEQ ID NO: 1439 (700158806H1), SEQ ID NO: 2755 (700161125H1), SEQ ID NO: 1449 (700158823H1), SEQ ID NO: 107 (700142566H1), SEQ ID NO: 2916 (700161388H1), SEQ ID NO: 3160 (700161766H1), SEQ ID NO: 3001 (700161515H1), SEQ ID NO: 1940 (700159780H1), SEQ ID NO: 2918 (700161390H1), SEQ ID NO: 426 (700156915H1), SEQ ID NO: 1024 (700157988H1), SEQ ID NO: 2468 (700160654H1), SEQ ID NO: 1886 (700159694H1), SEQ ID NO: 1160 (700158208H1), SEQ ID NO: 411 (700156889H1), SEQ ID NO: 1570 (700159068H1), SEQ ID NO: 3371 (700162137H1), SEQ ID NO: 1942 (700159783H1), SEQ ID NO: 3132 (700161719H1), SEQ ID NO: 138 (700156425H1), SEQ ID NO: 2870 (700161314H1), SEQ ID NO: 2624 (700160904H1), SEQ ID NO: 3518 (700162435H1), SEQ ID NO: 2931 (700161413H1), SEQ ID NO: 1649 (700159219H1), SEQ ID NO: 2477 (700160667H1), SEQ ID NO: 1513 (700158949H1), SEQ ID NO: 3340 (700162062H1), SEQ ID NO: 884 (700157746H1), SEQ ID NO: 1701 (700159340H1), SEQ ID NO: 2480 (700160671H1), SEQ ID NO: 938 (700157837H1), SEQ ID NO: 2834 (700161257H1), SEQ ID NO: 1020 (700157981H1), SEQ ID NO: 2272 (700160340H1), SEQ ID NO: 2055 (700159981H1), SEQ ID NO: 489 (700157022H1), SEQ ID NO: 1294 (700158449H1), SEQ ID NO: 1597 (700159125H1), SEQ ID NO: 1172 (700158240H1), SEQ ID NO: 1243 (700158366H1), SEQ ID NO: 2482 (700160674H1), SEQ ID NO: 2544 (700160768H1), SEQ ID NO: 2862 (700161296H1), SEQ ID NO: 2704 (700161024H1), SEQ ID NO: 2369 (700160492H1), SEQ ID NO: 3242 (700161894H1), SEQ ID NO: 2948 (700161439H1), SEQ ID NO: 1315 (700158484H1), SEQ ID NO: 2700 (700161016H1), SEQ ID NO: 1436 (700158695H1), SEQ ID NO: 1996 (700159877H1), SEQ ID NO: 172 (700156474H1), SEQ ID NO: 1787 (700159515H1), SEQ ID NO: 1929 (700159766H1), SEQ ID NO: 3601 (700162584H1), SEQ ID NO: 1615 (700159167H1), SEQ ID NO: 852 (700157686H1), SEQ ID NO: 2267 (700160335H1), SEQ ID NO: 2887 (700161344H1), SEQ ID NO: 803 (700157615H1), SEQ ID NO: 1878 (700159679H1), SEQ ID NO: 2026 (700159930H1), SEQ ID NO: 1250 (700158376H1), SEQ ID NO: 573 (700157172H1), SEQ ID NO: 105 (700142562H1), SEQ ID NO: 2205 (700160225H1), SEQ ID NO: 2389 (700160522H1), SEQ ID NO: 2876 (700161326H1), SEQ ID NO: 62 (700142492H1), SEQ ID NO: 2469 (700160658H1), SEQ ID NO: 1206 (700158310H1), SEQ ID NO: 666 (700157334H1), SEQ ID NO: 179 (700156486H1), SEQ ID NO: 1378 (700158590H1), SEQ ID NO: 3316 (700162025H1), SEQ ID NO: 578 (700157181H1), SEQ ID NO: 2433 (700160601H1), SEQ ID NO: 865 (700157712H1), SEQ ID NO: 1726 (700159386H1), SEQ ID NO: 3165 (700161772H1), SEQ ID NO: 1409 (700158643H1), SEQ ID NO: 2183 (700160186H1), SEQ ID NO: 2977 (700161476H1), SEQ ID NO: 1985 (700159863H1), SEQ ID NO: 768 (700157547H1), SEQ ID NO: 1499 (700158924H1), SEQ ID NO: 1404 (700158632H1), SEQ ID NO: 374 (700156831H1), SEQ ID NO: 1908 (700159733H1), SEQ ID NO: 1405 (700158636H1), SEQ ID NO: 1543 (700159020H1), SEQ ID NO: 2139 (700160115H1), SEQ ID NO: 1258 (700158387H1), SEQ ID NO: 3344 (700162066H1), SEQ ID NO: 3580 (700162539H1), SEQ ID NO: 1830 (700159602H2), SEQ ID NO: 3531 (700162455H1), SEQ ID NO: 515 (700157065H1), SEQ ID NO: 2723 (700161051H1), SEQ ID NO: 191 (700156519H1), SEQ ID NO: 3259 (700161925H1), SEQ ID NO: 622 (700157251H1), SEQ ID NO: 68 (700142503H1), SEQ ID NO: 32 (700142451H1), SEQ ID NO: 80 (700142523H1), SEQ ID NO: 2225 (700160259H1), SEQ ID NO: 37 (700142458H1), SEQ ID NO: 559 (700157147H1), SEQ ID NO: 581 (700157185H1), SEQ ID NO: 3042 (700161571H1), SEQ ID NO: 2789 (700161181H1), SEQ ID NO: 2692 (700161003H1), SEQ ID NO: 1493 (700158915H1), SEQ ID NO: 2431 (700160595H1), SEQ ID NO: 270 (700156667H1), SEQ ID NO: 2010 (700159905H1), SEQ ID NO: 3401 (700162185H1), SEQ ID NO: 3501 (700162392H1), SEQ ID NO: 307 (700156727H1), SEQ ID NO: 2830 (700161249H1), SEQ ID NO: 3464 (700162321H1), SEQ ID NO: 1034 (700158010H1), SEQ ID NO: 2573 (700160826H1), SEQ ID NO: 1657 (700159236H1), SEQ ID NO: 1646 (700159214H1), SEQ ID NO: 198 (700156531H1), SEQ ID NO: 151 (700156441H1), SEQ ID NO: 3257 (700161923H1), SEQ ID NO: 3553 (700162485H1), SEQ ID NO: 1839 (700159614H2), SEQ ID NO: 3056 (700161591H1), SEQ ID NO: 3320 (700162032H1), SEQ ID NO: 629 (700157262H1), SEQ ID NO: 1889 (700159703H1), SEQ ID NO: 2628 (700160908H1), SEQ ID NO: 1670 (700159272H1), SEQ ID NO: 1274 (700158421H1), SEQ ID NO: 1039 (700158016H1), SEQ ID NO: 1975 (700159850H1), SEQ ID NO: 2951 (700161442H1), SEQ ID NO: 1042 (700158020H1), SEQ ID NO: 1521 (700158980H1), SEQ ID NO: 1119 (700158143H1), SEQ ID NO: 277 (700156677H1), SEQ ID NO: 519 (700157072H1), SEQ ID NO: 1422 (700158672H1), SEQ ID NO: 2315 (700160405H1), SEQ ID NO: 922 (700157810H1), SEQ ID NO: 1175 (700158245H1), SEQ ID NO: 1763 (700159461H1), SEQ ID NO: 701 (700157405H1), SEQ ID NO: 2540 (700160761H1), SEQ ID NO: 1157 (700158204H1), SEQ ID NO: 576 (700157177H1), SEQ ID NO: 356 (700156801H1), SEQ ID NO: 1375 (700158585H1), SEQ ID NO: 3146 (700161738H1), SEQ ID NO: 3150 (700161744H1), SEQ ID NO: 1464 (700158854H1), SEQ ID NO: 2963 (700161457H1), SEQ ID NO: 2213 (700160236H1), SEQ ID NO: 1128 (700158158H1), SEQ ID NO: 3528 (700162450H1), SEQ ID NO: 1730 (700159395H1), SEQ ID NO: 3168 (700161775H1), SEQ ID NO: 918 (700157804H1), SEQ ID NO: 1775 (700159482H1), SEQ ID NO: 2676 (700160978H1), SEQ ID NO: 1567 (700159064H1), SEQ ID NO: 2412 (700160563H1), SEQ ID NO: 1003 (700157957H1), SEQ ID NO: 109 (700142571H1), SEQ ID NO: 1589 (700159110H1), SEQ ID NO: 508 (700157053H1), SEQ ID NO: 354 (700156792H1), SEQ ID NO: 505 (700157045H1), SEQ ID NO: 1307 (700158470H1), SEQ ID NO: 600 (700157219H1), SEQ ID NO: 1121 (700158145H1), SEQ ID NO: 1377 (700158588H1), SEQ ID NO: 2710 (700161034H1), SEQ ID NO: 1843 (700159620H2), SEQ ID NO: 998 (700157949H1), SEQ ID NO: 3564 (700162513H1), SEQ ID NO: 2708 (700161029H1), SEQ ID NO: 796 (700157593H1), SEQ ID NO: 1346 (700158541H1), SEQ ID NO: 2594 (700160860H1), SEQ ID NO: 898 (700157768H1), SEQ ID NO: 3384 (700162163H1), SEQ ID NO: 1552 (700159036H1), SEQ ID NO: 1554 (700159038H1), SEQ ID NO: 1712 (700159356H1), SEQ ID NO: 3094 (700161653H1), SEQ ID NO: 3525 (700162447H1), SEQ ID NO: 1858 (700159650H1), SEQ ID NO: 3428 (700162243H1), SEQ ID NO: 1997 (700159879H1), SEQ ID NO: 2451 (700160628H1), SEQ ID NO: 429 (700156922H1), SEQ ID NO: 1906 (700159731H1), SEQ ID NO: 2660 (700160954H1), SEQ ID NO: 1557 (700159046H1), SEQ ID NO: 2672 (700160972H1), SEQ ID NO: 1066 (700158055H1), SEQ ID NO: 3449 (700162285H1), SEQ ID NO: 1693 (700159327H1), SEQ ID NO: 601 (700157222H1), SEQ ID NO: 3527 (700162449H1), SEQ ID NO: 85 (700142532H1), SEQ ID NO: 2062 (700159989H1), SEQ ID NO: 1862 (700159656H1), SEQ ID NO: 3544 (700162472H1), SEQ ID NO: 279 (700156681H1), SEQ ID NO: 2842 (700161267H1), SEQ ID NO: 1210 (700158315H1), SEQ ID NO: 2456 (700160640H1), SEQ ID NO: 2620 (700160893H1), SEQ ID NO: 724 (700157446H1), SEQ ID NO: 615 (700157240H1), SEQ ID NO: 1694 (700159328H1), SEQ ID NO: 500 (700157039H1), SEQ ID NO: 2781 (700161170H1), SEQ ID NO: 2909 (700161381H1), SEQ ID NO: 436 (700156929H1), SEQ ID NO: 1036 (700158013H1), SEQ ID NO: 1736 (700159416H1), SEQ ID NO: 2569 (700160819H1), SEQ ID NO: 3313 (700162020H1), SEQ ID NO: 1073 (700158065H1), SEQ ID NO: 1990 (700159869H1), SEQ ID NO: 88 (700142539H1), SEQ ID NO: 1704 (700159347H1), SEQ ID NO: 1158 (700158205H1), SEQ ID NO: 3586 (700162548H1), SEQ ID NO: 1901 (700159724H1), SEQ ID NO: 1994 (700159875H1), SEQ ID NO: 3142 (700161734H1), SEQ ID NO: 2907 (700161378H1), SEQ ID NO: 1937 (700159776H1), SEQ ID NO: 2767 (700161143H1), SEQ ID NO: 2032 (700159941H1), SEQ ID NO: 3099 (700161661H1), SEQ ID NO: 2828 (700161245H1), SEQ ID NO: 437 (700156933H1), SEQ ID NO: 2985 (700161490H1), SEQ ID NO: 2499 (700160691H1), SEQ ID NO: 2336 (700160436H1), SEQ ID NO: 1074 (700158066H1), SEQ ID NO: 2073 (700160007H1), SEQ ID NO: 2956 (700161448H1), SEQ ID NO: 1089 (700158086H1), SEQ ID NO: 2195 (700160211H1), SEQ ID NO: 1741 (700159425H1), SEQ ID NO: 607 (700157229H1), SEQ ID NO: 2840 (700161265H1), SEQ ID NO: 2649 (700160942H1), SEQ ID NO: 1221 (700158332H1), SEQ ID NO: 1813 (700159568H1), SEQ ID NO: 1805 (700159552H1), SEQ ID NO: 285 (700156691H1), SEQ ID NO: 294 (700156709H1), SEQ ID NO: 3291 (700161979H1), SEQ ID NO: 2634 (700160921H1), SEQ ID NO: 3039 (700161567H1), SEQ ID NO: 3054 (700161589H1), SEQ ID NO: 453 (700156964H1), SEQ ID NO: 2681 (700160985H1), SEQ ID NO: 937 (700157836H1), SEQ ID NO: 1703 (700159346H1), SEQ ID NO: 2829 (700161247H1), SEQ ID NO: 3120 (700161693H1), SEQ ID NO: 552 (700157137H1), SEQ ID NO: 1431 (700158688H1), SEQ ID NO: 1806 (700159554H1), SEQ ID NO: 1814 (700159570H1), SEQ ID NO: 3308 (700162013H1), SEQ ID NO: 167 (700156463H1), SEQ ID NO: 2059 (700159986H1), SEQ ID NO: 242 (700156618H1), SEQ ID NO: 1256 (700158383H1), SEQ ID NO: 744 (700157489H1), SEQ ID NO: 1895 (700159716H1), SEQ ID NO: 440 (700156938H1), SEQ ID NO: 3217 (700161849H1), SEQ ID NO: 2831 (700161251H1), SEQ ID NO: 1015 (700157975H1), SEQ ID NO: 1366 (700158568H1), SEQ ID NO: 314 (700156740H1), SEQ ID NO: 2188 (700160195H1), SEQ ID NO: 84 (700142528H1), SEQ ID NO: 3069 (700161614H1), SEQ ID NO: 2952 (700161443H1), SEQ ID NO: 53 (700142478H1), SEQ ID NO: 1778 (700159492H1), SEQ ID NO: 1881 (700159685H1), SEQ ID NO: 1907 (700159732H1), SEQ ID NO: 614 (700157239H1), SEQ ID NO: 3395 (700162178H1), SEQ ID NO: 1312 (700158481H1), SEQ ID NO: 243 (700156621H1), SEQ ID NO: 1131 (700158163H1), SEQ ID NO: 678 (700157359H1), SEQ ID NO: 1506 (700158934H1), SEQ ID NO: 2643 (700160932H1), SEQ ID NO: 2593 (700160857H1), SEQ ID NO: 142 (700156430H1), SEQ ID NO: 2371 (700160494H1), SEQ ID NO: 925 (700157817H1), SEQ ID NO: 3041 (700161570H1), SEQ ID NO: 3050 (700161583H1), SEQ ID NO: 3079 (700161637H1), SEQ ID NO: 1245 (700158369H1), SEQ ID NO: 2309 (700160391H1), SEQ ID NO: 2713 (700161037H1), SEQ ID NO: 1289 (700158440H1), SEQ ID NO: 635 (700157268H1), SEQ ID NO: 653 (700157309H1), SEQ ID NO: 244 (700156623H1), SEQ ID NO: 338 (700156771H1), SEQ ID NO: 1406 (700158637H1), SEQ ID NO: 2941 (700161430H1), SEQ ID NO: 2516 (700160725H1), SEQ ID NO: 1945 (700159791H1), SEQ ID NO: 1485 (700158902H1), SEQ ID NO: 3045 (700161576H1), SEQ ID NO: 1271 (700158417H1), SEQ ID NO: 2786 (700161176H1), SEQ ID NO: 156 (700156447H1), SEQ ID NO: 1367 (700158574H1), SEQ ID NO: 3169 (700161776H1), SEQ ID NO: 2076 (700160012H1), SEQ ID NO: 3253 (700161917H1), SEQ ID NO: 950 (700157857H1), SEQ ID NO: 1237 (700158356H1), SEQ ID NO: 2063 (700159990H1), SEQ ID NO: 3574 (700162527H1), SEQ ID NO: 580 (700157183H1), SEQ ID NO: 2034 (700159943H1), SEQ ID NO: 892 (700157757H1), SEQ ID NO: 1096 (700158104H1), SEQ ID NO: 1883 (700159691H1), SEQ ID NO: 2966 (700161460H1), SEQ ID NO: 1632 (700159193H1), SEQ ID NO: 1811 (700159565H1), SEQ ID NO: 1803 (700159549H1), SEQ ID NO: 2390 (700160523H1), SEQ ID NO: 2329 (700160426H1), SEQ ID NO: 2835 (700161259H1), SEQ ID NO: 1428 (700158681H1), SEQ ID NO: 2016 (700159915H1), SEQ ID NO: 3487 (700162367H1), SEQ ID NO: 2699 (700161014H1), SEQ ID NO: 2694 (700161006H1), SEQ ID NO: 163 (700156456H1), SEQ ID NO: 2302 (700160381H1), SEQ ID NO: 23 (700142438H1), SEQ ID NO: 1720 (700159376H1), SEQ ID NO: 1519 (700158975H1), SEQ ID NO: 569 (700157166H1), SEQ ID NO: 3015 (700161536H1), SEQ ID NO: 521 (700157076H1), SEQ ID NO: 736 (700157474H1), SEQ ID NO: 626 (700157256H1), SEQ ID NO: 1846 (700159627H2), SEQ ID NO: 1642 (700159209H1), SEQ ID NO: 2391 (700160526H1), SEQ ID NO: 2410 (700160559H1), SEQ ID NO: 2061 (700159988H1), SEQ ID NO: 413 (700156891H1), SEQ ID NO: 1072 (700158064H1), SEQ ID NO: 1038 (700158015H1), SEQ ID NO: 1854 (700159641H2), SEQ ID NO: 143 (700156431H1), SEQ ID NO: 81 (700142524H1), SEQ ID NO: 3111 (700161679H1), SEQ ID NO: 2806 (700161213H1), SEQ ID NO: 139 (700156426H1), SEQ ID NO: 43 (700142466H1), SEQ ID NO: 185 (700156495H1), SEQ ID NO: 2524 (700160737H1), SEQ ID NO: 64 (700142494H1), SEQ ID NO: 3171 (700161778H1), SEQ ID NO: 2707 (700161028H1), SEQ ID NO: 2033 (700159942H1), SEQ ID NO: 639 (700157276H1), SEQ ID NO: 532 (700157093H1), SEQ ID NO: 3155 (700161756H1), SEQ ID NO: 1338 (700158531H1), SEQ ID NO: 575 (700157176H1), SEQ ID NO: 1177 (700158248H1), SEQ ID NO: 1099 (700158107H1), SEQ ID NO: 1861 (700159654H1), SEQ ID NO: 1832 (700159606H2), SEQ ID NO: 829 (700157650H1), SEQ ID NO: 878 (700157737H1), SEQ ID NO: 1443 (700158812H1), SEQ ID NO: 329 (700156761H1), SEQ ID NO: 3227 (700161866H1), SEQ ID NO: 851 (700157685H1), SEQ ID NO: 2728 (700161056H1), SEQ ID NO: 2854 (700161284H1), SEQ ID NO: 3547 (700162477H1), SEQ ID NO: 2393 (700160529H1), SEQ ID NO: 323 (700156754H1), SEQ ID NO: 1407 (700158638H1), SEQ ID NO: 187 (700156506H1), SEQ ID NO: 441 (700156940H1), SEQ ID NO: 1904 (700159728H1), SEQ ID NO: 1386 (700158605H1), SEQ ID NO: 3323 (700162037H1), SEQ ID NO: 2576 (700160830H1), SEQ ID NO: 1283 (700158434H1), SEQ ID NO: 2048 (700159970H1), SEQ ID NO: 2123 (700160085H1), SEQ ID NO: 2305 (700160385H1), SEQ ID NO: 1191 (700158278H1), SEQ ID NO: 1420 (700158669H1), SEQ ID NO: 335 (700156767H1), SEQ ID NO: 2889 (700161346H1), SEQ ID NO: 798 (700157601H1), SEQ ID NO: 976 (700157911H1), SEQ ID NO: 104 (700142561H1), SEQ ID NO: 1052 (700158034H1), SEQ ID NO: 1347 (700158542H1), SEQ ID NO: 1653 (700159226H1), SEQ ID NO: 958 (700157868H1), SEQ ID NO: 2252 (700160313H1), SEQ ID NO: 2181 (700160184H1), SEQ ID NO: 971 (700157895H1), SEQ ID NO: 2492 (700160684H1), SEQ ID NO: 1043 (700158021H1), SEQ ID NO: 12 (700142422H1), SEQ ID NO: 592 (700157207H1), SEQ ID NO: 3163 (700161770H1), SEQ ID NO: 3331 (700162049H1), SEQ ID NO: 2591 (700160855H1), SEQ ID NO: 2153 (700160140H1), SEQ ID NO: 1917 (700159748H1), SEQ ID NO: 2824 (700161241H1), SEQ ID NO: 3407 (700162206H1), SEQ ID NO: 1453 (700158832H1), SEQ ID NO: 2747 (700161102H1), SEQ ID NO: 2801 (700161206H1), SEQ ID NO: 1558 (700159047H1), SEQ ID NO: 2888 (700161345H1), SEQ ID NO: 1681 (700159307H1), SEQ ID NO: 2330 (700160427H1), SEQ ID NO: 1607 (700159151H1), SEQ ID NO: 1635 (700159196H1), SEQ ID NO: 2115 (700160076H1), SEQ ID NO: 656 (700157319H1), SEQ ID NO: 888 (700157751H1), SEQ ID NO: 711 (700157424H1), SEQ ID NO: 2307 (700160387H1), SEQ ID NO: 145 (700156433H1), SEQ ID NO: 1734 (700159411H1), SEQ ID NO: 342 (700156776H1), SEQ ID NO: 1842 (700159619H2), SEQ ID NO: 1360 (700158558H1), SEQ ID NO: 799 (700157605H1), SEQ ID NO: 1759 (700159454H1), SEQ ID NO: 2486 (700160678H1), SEQ ID NO: 3194 (700161816H1), SEQ ID NO: 1457 (700158839H1), SEQ ID NO: 2666 (700160964H1), SEQ ID NO: 3509 (700162417H1), SEQ ID NO: 2430 (700160593H1), SEQ ID NO: 446 (700156951H1), SEQ ID NO: 3273 (700161948H1), SEQ ID NO: 822 (700157642H1), SEQ ID NO: 1981 (700159857H1), SEQ ID NO: 1146 (700158184H1), SEQ ID NO: 3594 (700162570H1), SEQ ID NO: 2179 (700160180H1), SEQ ID NO: 1195 (700158285H1), SEQ ID NO: 3489 (700162376H1), SEQ ID NO: 2192 (700160204H1), SEQ ID NO: 3023 (700161547H1), SEQ ID NO: 363 (700156813H1), SEQ ID NO: 2498 (700160690H1), SEQ ID NO: 2491 (700160683H1), SEQ ID NO: 1875 (700159673H1), SEQ ID NO: 127 (700156407H1), SEQ ID NO: 1381 (700158596H1), SEQ ID NO: 1630 (700159187H1), SEQ ID NO: 3325 (700162042H1), SEQ ID NO: 3444 (700162277H1), SEQ ID NO: 1705 (700159348H1), SEQ ID NO: 2533 (700160750H1), SEQ ID NO: 1986 (700159864H1), SEQ ID NO: 2348 (700160459H1), SEQ ID NO: 3019 (700161541H1), SEQ ID NO: 2557 (700160795H1), SEQ ID NO: 3212 (700161842H1), SEQ ID NO: 3202 (700161826H1), SEQ ID NO: 1745 (700159435H1), SEQ ID NO: 188 (700156511H1), SEQ ID NO: 964 (700157879H1), SEQ ID NO: 3470 (700162338H1), SEQ ID NO: 3603 (700162591H1), SEQ ID NO: 2500 (700160692H1), SEQ ID NO: 2775 (700161157H1), SEQ ID NO: 2778 (700161166H1), SEQ ID NO: 1740 (700159423H1), SEQ ID NO: 1576 (700159081H1), SEQ ID NO: 3508 (700162414H1), SEQ ID NO: 3484 (700162364H1), SEQ ID NO: 1054 (700158037H1), SEQ ID NO: 4316 (700454828H1), SEQ ID NO: 4594 (700455401H1), SEQ ID NO: 4100 (700454421H1), SEQ ID NO: 5528 (700457192H1), SEQ ID NO: 5760 (700457654H1), SEQ ID NO: 3797 (700453825H1), SEQ ID NO: 5257 (700456691H1), SEQ ID NO: 3788 (700453810H1), SEQ ID NO: 4097 (700454418H1), SEQ ID NO: 5731 (700457589H1), SEQ ID NO: 5009 (700456178H1), SEQ ID NO: 4972 (700456102H1), SEQ ID NO: 5423 (700457018H1), SEQ ID NO: 4519 (700455175H1), SEQ ID NO: 4729 (700455675H1), SEQ ID NO: 5640 (700457388H1), SEQ ID NO: 6092 (700458353H1), SEQ ID NO: 4157 (700454513H1), SEQ ID NO: 6103 (700458378H1), SEQ ID NO: 3821 (700453864H1), SEQ ID NO: 4968 (700456094H1), SEQ ID NO: 4292 (700454771H1), SEQ ID NO: 5425 (700457023H1), SEQ ID NO: 5154 (700456454H1), SEQ ID NO: 5445 (700457055H1), SEQ ID NO: 5146 (700456444H1), SEQ ID NO: 4643 (700455525H1), SEQ ID NO: 5267 (700456715H1), SEQ ID NO: 4380 (700454949H1), SEQ ID NO: 3883 (700453981H1), SEQ ID NO: 5847 (700457846H1), SEQ ID NO: 4889 (700455957H1), SEQ ID NO: 5239 (700456657H1), SEQ ID NO: 5072 (700456315H1), SEQ ID NO: 6018 (700458195H1), SEQ ID NO: 5205 (700456575H1), SEQ ID NO: 5826 (700457804H1), SEQ ID NO: 4475 (700455102H1), SEQ ID NO: 5429 (700457030H1), SEQ ID NO: 5452 (700457062H1), SEQ ID NO: 5453 (700457063H1), SEQ ID NO: 4131 (700454465H1), SEQ ID NO: 5538 (700457213H1), SEQ ID NO: 5540 (700457215H1), SEQ ID NO: 5433 (700457035H1), SEQ ID NO: 3984 (700454206H1), SEQ ID NO: 5369 (700456891H1), SEQ ID NO: 5766 (700457667H1), SEQ ID NO: 5699 (700457519H1), SEQ ID NO: 5698 (700457518H1), SEQ ID NO: 5907 (700457953H1), SEQ ID NO: 5829 (700457808H1), SEQ ID NO: 5872 (700457887H1), SEQ ID NO: 4247 (700454678H1), SEQ ID NO: 5225 (700456633H1), SEQ ID NO: 4823 (700455851H1), SEQ ID NO: 4083 (700454394H1), SEQ ID NO: 4084 (700454395H1), SEQ ID NO: 4030 (700454295H1), SEQ ID NO: 5636 (700457380H1), SEQ ID NO: 4784 (700455780H1), SEQ ID NO: 5925 (700457993H1), SEQ ID NO: 6119 (700458416H1), SEQ ID NO: 6124 (700458424H1), SEQ ID NO: 4463 (700455081H1), SEQ ID NO: 5554 (700457243H1), SEQ ID NO: 5497 (700457136H1), SEQ ID NO: 5602 (700457326H1), SEQ ID NO: 5651 (700457411H1), SEQ ID NO: 4522 (700455178H1), SEQ ID NO: 5647 (700457403H1), SEQ ID NO: 5426 (700457025H1), SEQ ID NO: 5395 (700456958H1), SEQ ID NO: 5422 (700457017H1), SEQ ID NO: 6127 (700458428H1), SEQ ID NO: 6121 (700458420H1), SEQ ID NO: 6128 (700458429H1), SEQ ID NO: 4915 (700456004H1), SEQ ID NO: 5183 (700456520H1), SEQ ID NO: 5179 (700456505H1), SEQ ID NO: 5480 (700457107H1), SEQ ID NO: 6070 (700458311H1), SEQ ID NO: 4263 (700454707H1), SEQ ID NO: 4325 (700454841H1), SEQ ID NO: 5552 (700457241H1), SEQ ID NO: 6241 (700458630H1), SEQ ID NO: 4853 (700455908H1), SEQ ID NO: 5088 (700456339H1), SEQ ID NO: 5082 (700456331H1), SEQ ID NO: 4419 (700455012H1), SEQ ID NO: 5131 (700456416H1), SEQ ID NO: 4417 (700455010H1), SEQ ID NO: 4137 (700454471H1), SEQ ID NO: 4786 (700455782H1), SEQ ID NO: 5221 (700456626H1), SEQ ID NO: 4095 (700454414H1), SEQ ID NO: 4453 (700455062H1), SEQ ID NO: 5253 (700456683H1), SEQ ID NO: 4588 (700455290H1), SEQ ID NO: 4456 (700455068H1), SEQ ID NO: 4428 (700455024H1), SEQ ID NO: 3825 (700453874H1), SEQ ID NO: 4686 (700455610H1), SEQ ID NO: 4711 (700455650H1), SEQ ID NO: 4067 (700454365H1), SEQ ID NO: 4436 (700455038H1), SEQ ID NO: 6010 (700458175H1), SEQ ID NO: 4256 (700454692H1), SEQ ID NO: 5474 (700457092H1), SEQ ID NO: 4656 (700455554H1), SEQ ID NO: 4832 (700455867H1), SEQ ID NO: 5744 (700457627H1), SEQ ID NO: 5226 (700456634H1), SEQ ID NO: 4529 (700455189H1), SEQ ID NO: 5471 (700457085H1), SEQ ID NO: 5451 (700457061H1), SEQ ID NO: 5828 (700457807H1), SEQ ID NO: 5771 (700457674H1), SEQ ID NO: 4957 (700456074H1), SEQ ID NO: 4985 (700456127H1), SEQ ID NO: 4981 (700456114H1), SEQ ID NO: 3971 (700454173H1), SEQ ID NO: 4060 (700454351H1), SEQ ID NO: 4734 (700455681H1), SEQ ID NO: 5136 (700456423H1), SEQ ID NO: 5680 (700457471H1), SEQ ID NO: 5980 (700458123H1), SEQ ID NO: 3940 (700454119H1), SEQ ID NO: 3866 (700453958H1), SEQ ID NO: 5861 (700457867H1), SEQ ID NO: 3836 (700453895H1), SEQ ID NO: 5458 (700457072H1), SEQ ID NO: 4366 (700454923H1), SEQ ID NO: 4211 (700454614H1), SEQ ID NO: 6273 (700458684H1), SEQ ID NO: 5875 (700457891H1), SEQ ID NO: 5140 (700456433H1), SEQ ID NO: 5986 (700458136H1), SEQ ID NO: 6262 (700458668H1), SEQ ID NO: 5247 (700456675H1), SEQ ID NO: 5721 (700457565H1), SEQ ID NO: 4531 (700455195H1), SEQ ID NO: 5577 (700457273H1), SEQ ID NO: 4399 (700454984H1), SEQ ID NO: 6072 (700458313H1), SEQ ID NO: 4442 (700455048H1), SEQ ID NO: 4078 (700454381H1), SEQ ID NO: 4751 (700455713H1), SEQ ID NO: 5790 (700457717H1), SEQ ID NO: 5406 (700456977H1), SEQ ID NO: 4532 (700455196H1), SEQ ID NO: 4012 (700454262H1), SEQ ID NO: 5556 (700457245H1), SEQ ID NO: 5262 (700456707H1), SEQ ID NO: 4900 (700455974H1), SEQ ID NO: 5290 (700456752H1), SEQ ID NO: 3957 (700454145H1), SEQ ID NO: 6291 (700458826H1), SEQ ID NO: 6292 (700458827H1), SEQ ID NO: 4639 (700455517H1), SEQ ID NO: 6137 (700458443H1), SEQ ID NO: 4367 (700454925H1), SEQ ID NO: 4467 (700455085H1), SEQ ID NO: 5473 (700457090H1), SEQ ID NO: 5482 (700457115H1), SEQ ID NO: 4266 (700454717H1), SEQ ID NO: 4272 (700454725H1), SEQ ID NO: 4356 (700454909H1), SEQ ID NO: 4135 (700454469H1), SEQ ID NO: 5259 (700456694H1), SEQ ID NO: 5736 (700457604H1), SEQ ID NO: 5114 (700456381H1), SEQ ID NO: 5656 (700457419H1), SEQ ID NO: 4512 (700455167H1), SEQ ID NO: 4460 (700455077H1), SEQ ID NO: 4553 (700455237H1), SEQ ID NO: 4373 (700454937H1), SEQ ID NO: 4400 (700454985H1), SEQ ID NO: 5379 (700456917H1), SEQ ID NO: 5678 (700457466H1), SEQ ID NO: 5746 (700457629H1), SEQ ID NO: 5152 (700456452H1), SEQ ID NO: 5133 (700456418H1), SEQ ID NO: 4908 (700455987H1), SEQ ID NO: 5650 (700457409H1), SEQ ID NO: 6060 (700458287H1), SEQ ID NO: 6011 (700458178H1), SEQ ID NO: 4271 (700454724H1), SEQ ID NO: 5489 (700457124H1), SEQ ID NO: 5762 (700457658H1), SEQ ID NO: 4068 (700454366H1), SEQ ID NO: 4075 (700454377H1), SEQ ID NO: 3910 (700454049H1), SEQ ID NO: 4394 (700454970H1), SEQ ID NO: 5450 (700457060H1), SEQ ID NO: 5719 (700457561H1), SEQ ID NO: 5763 (700457660H1), SEQ ID NO: 4725 (700455669H1), SEQ ID NO: 4003 (700454241H1), SEQ ID NO: 5487 (700457122H1), SEQ ID NO: 5264 (700456711H1), SEQ ID NO: 5850 (700457850H1), SEQ ID NO: 5501 (700457141H1), SEQ ID NO: 4085 (700454396H1), SEQ ID NO: 4091 (700454409H1), SEQ ID NO: 4404 (700454989H1), SEQ ID NO: 5390 (700456948H1), SEQ ID NO: 5751 (700457638H1), SEQ ID NO: 4914 (700456003H1), SEQ ID NO: 6035 (700458234H1), SEQ ID NO: 6078 (700458322H1), SEQ ID NO: 5893 (700457927H1), SEQ ID NO: 5309 (700456784H1), SEQ ID NO: 4539 (700455212H1), SEQ ID NO: 5551 (700457240H1), SEQ ID NO: 5522 (700457174H1), SEQ ID NO: 5486 (700457121H1), SEQ ID NO: 4478 (700455106H1), SEQ ID NO: 4139 (700454474H1), SEQ ID NO: 5938 (700458026H1), SEQ ID NO: 6329 (700458889H1), SEQ ID NO: 5155 (700456455H1), SEQ ID NO: 5883 (700457911H1), SEQ ID NO: 3873 (700453966H1), SEQ ID NO: 4652 (700455543H1), SEQ ID NO: 4425 (700455021H1), SEQ ID NO: 4406 (700454992H1), SEQ ID NO: 6084 (700458339H1), SEQ ID NO: 3644 (700405359H1), SEQ ID NO: 5258 (700456692H1), SEQ ID NO: 4088 (700454405H1), SEQ ID NO: 3976 (700454186H1), SEQ ID NO: 4054 (700454337H1), SEQ ID NO: 4704 (700455637H1), SEQ ID NO: 3707 (700405462H1), SEQ ID NO: 6165 (700458510H1), SEQ ID NO: 6058 (700458285H1), SEQ ID NO: 4275 (700454729H1), SEQ ID NO: 3755 (700453757H1), SEQ ID NO: 5566 (700457256H1), SEQ ID NO: 4545 (700455226H1), SEQ ID NO: 4144 (700454483H1), SEQ ID NO: 5216 (700456614H1), SEQ ID NO: 4490 (700455127H1), SEQ ID NO: 5278 (700456729H1), SEQ ID NO: 5260 (700456695H1), SEQ ID NO: 5157 (700456458H1), SEQ ID NO: 5483 (700457116H1), SEQ ID NO: 4032 (700454303H1), SEQ ID NO: 5709 (700457540H1), SEQ ID NO: 4125 (700454456H1), SEQ ID NO: 4503 (700455152H1), SEQ ID NO: 4567 (700455262H1), SEQ ID NO: 5442 (700457051H1), SEQ ID NO: 5573 (700457266H1), SEQ ID NO: 5531 (700457202H1), SEQ ID NO: 4031 (700454302H1), SEQ ID NO: 5381 (700456920H1), SEQ ID NO: 6257 (700458655H1), SEQ ID NO: 4322 (700454836H1), SEQ ID NO: 6059 (700458286H1), SEQ ID NO: 5090 (700456344H1), SEQ ID NO: 4920 (700456014H1), SEQ ID NO: 4555 (700455240H1), SEQ ID NO: 6046 (700458257H1), SEQ ID NO: 3985 (700454209H1), SEQ ID NO: 3988 (700454213H1), SEQ ID NO: 5163 (700456469H1), SEQ ID NO: 5791 (700457720H1), SEQ ID NO: 4363 (700454917H1), SEQ ID NO: 4474 (700455101H1), SEQ ID NO: 4337 (700454859H1), SEQ ID NO: 4340 (700454864H1), SEQ ID NO: 3786 (700453808H1), SEQ ID NO: 3686 (700405427H1), SEQ ID NO: 5691 (700457504H1), SEQ ID NO: 4059 (700454350H1), SEQ ID NO: 4038 (700454313H1), SEQ ID NO: 4039 (700454314H1), SEQ ID NO: 5147 (700456445H1), SEQ ID NO: 4376 (700454942H1), SEQ ID NO: 3997 (700454229H1), SEQ ID NO: 3892 (700454004H1), SEQ ID NO: 5747 (700457630H1), SEQ ID NO: 4835 (700455873H1), SEQ ID NO: 3941 (700454121H1), SEQ ID NO: 3990 (700454221H1), SEQ ID NO: 5011 (700456186H1), SEQ ID NO: 5411 (700456986H1), SEQ ID NO: 5904 (700457948H1), SEQ ID NO: 5642 (700457392H1), SEQ ID NO: 4098 (700454419H1), SEQ ID NO: 5803 (700457750H1), SEQ ID NO: 4955 (700456069H1), SEQ ID NO: 5251 (700456679H1), SEQ ID NO: 6017 (700458194H1), SEQ ID NO: 4159 (700454516H1), SEQ ID NO: 4514 (700455169H1), SEQ ID NO: 5271 (700456720H1), SEQ ID NO: 4426 (700455022H1), SEQ ID NO: 4409 (700454996H1), SEQ ID NO: 4559 (700455247H1), SEQ ID NO: 5472 (700457088H1), SEQ ID NO: 3638 (700405352H1), SEQ ID NO: 5283 (700456741H1), SEQ ID NO: 5781 (700457692H1), SEQ ID NO: 5628 (700457367H1), SEQ ID NO: 5076 (700456324H1), SEQ ID NO: 5890 (700457924H1), SEQ ID NO: 4299 (700454785H1), SEQ ID NO: 3740 (700453730H1), SEQ ID NO: 5761 (700457656H1), SEQ ID NO: 5765 (700457663H1), SEQ ID NO: 4699 (700455630H1), SEQ ID NO: 4346 (700454880H1), SEQ ID NO: 6038 (700458240H1), SEQ ID NO: 4564 (700455257H1), SEQ ID NO: 5895 (700457929H1), SEQ ID NO: 5646 (700457402H1), SEQ ID NO: 4666 (700455575H1), SEQ ID NO: 4665 (700455574H1), SEQ ID NO: 3931 (700454106H1), SEQ ID NO: 4089 (700454406H1), SEQ ID NO: 3953 (700454139H1), SEQ ID NO: 3932 (700454107H1), SEQ ID NO: 3901 (700454033H1), SEQ ID NO: 3890 (700453995H1), SEQ ID NO: 5558 (700457247H1), SEQ ID NO: 4863 (700455922H1), SEQ ID NO: 3841 (700453912H1), SEQ ID NO: 6215 (700458576H1), SEQ ID NO: 4495 (700455139H1), SEQ ID NO: 5560 (700457250H1), SEQ ID NO: 3989 (700454219H1), SEQ ID NO: 6114 (700458404H1), SEQ ID NO: 5189 (700456528H1), SEQ ID NO: 5722 (700457568H1), SEQ ID NO: 4563 (700455255H1), SEQ ID NO: 6040 (700458242H1), SEQ ID NO: 5547 (700457230H1), SEQ ID NO: 4104 (700454426H1), SEQ ID NO: 4681 (700455604H1), SEQ ID NO: 6322 (700458877H1), SEQ ID NO: 3608 (700405305H1), SEQ ID NO: 4261 (700454705H1), SEQ ID NO: 5308 (700456783H1), SEQ ID NO: 5178 (700456503H1), SEQ ID NO: 3758 (700453762H1), SEQ ID NO: 3756 (700453759H1), SEQ ID NO: 3708 (700405463H1), SEQ ID NO: 5243 (700456663H1), SEQ ID NO: 6202 (700458557H1), SEQ ID NO: 6196 (700458549H1), SEQ ID NO: 5339 (700456844H1), SEQ ID NO: 4568 (700455263H1), SEQ ID NO: 5608 (700457336H1), SEQ ID NO: 4939 (700456049H1), SEQ ID NO: 5546 (700457225H1), SEQ ID NO: 5416 (700457006H1), SEQ ID NO: 5911 (700457961H1), SEQ ID NO: 5007 (700456175H1), SEQ ID NO: 5564 (700457254H1), SEQ ID NO: 5565 (700457255H1), SEQ ID NO: 5848 (700457848H1), SEQ ID NO: 4670 (700455579H1), SEQ ID NO: 5388 (700456942H1), SEQ ID NO: 4820 (700455846H1), SEQ ID NO: 5806 (700457760H1), SEQ ID NO: 5873 (700457888H1), SEQ ID NO: 5955 (700458063H1), SEQ ID NO: 5161 (700456463H1), SEQ ID NO: 4117 (700454445H1), SEQ ID NO: 5475 (700457093H1), SEQ ID NO: 3835 (700453894H1), SEQ ID NO: 3881 (700453979H1), SEQ ID NO: 5289 (700456751H1), SEQ ID NO: 4687 (700455611H1), SEQ ID NO: 5778 (700457688H1), SEQ ID NO: 5663 (700457434H1), SEQ ID NO: 6140 (700458451H1), SEQ ID NO: 4441 (700455046H1), SEQ ID NO: 4824 (700455853H1), SEQ ID NO: 3827 (700453878H1), SEQ ID NO: 4130 (700454464H1), SEQ ID NO: 4110 (700454435H1), SEQ ID NO: 5793 (700457726H1), SEQ ID NO: 5506 (700457147H1), SEQ ID NO: 6164 (700458509H1), SEQ ID NO: 4048 (700454329H1), SEQ ID NO: 5424 (700457020H1), SEQ ID NO: 5420 (700457012H1), SEQ ID NO: 6151 (700458468H1), SEQ ID NO: 4947 (700456059H1), SEQ ID NO: 4352 (700454902H1), SEQ ID NO: 6111 (700458395H1), SEQ ID NO: 6220 (700458587H1), SEQ ID NO: 6234 (700458616H1), SEQ ID NO: 4560 (700455252H1), SEQ ID NO: 4392 (700454967H1), SEQ ID NO: 4881 (700455944H1), SEQ ID NO: 4929 (700456036H1), SEQ ID NO: 5568 (700457258H1), SEQ ID NO: 5570 (700457260H1), SEQ ID NO: 5545 (700457223H1), SEQ ID NO: 4523 (700455179H1), SEQ ID NO: 5750 (700457637H1), SEQ ID NO: 4873 (700455936H1), SEQ ID NO: 6186 (700458537H1), SEQ ID NO: 6198 (700458552H1), SEQ ID NO: 5414 (700456994H1), SEQ ID NO: 5799 (700457740H1), SEQ ID NO: 5669 (700457445H1), SEQ ID NO: 5754 (700457644H1), SEQ ID NO: 4640 (700455518H1), SEQ ID NO: 3785 (700453807H1), SEQ ID NO: 6245 (700458639H1), SEQ ID NO: 3844 (700453919H1), SEQ ID NO: 3682 (700405418H1), SEQ ID NO: 3627 (700405340H1), SEQ ID NO: 5005 (700456169H1), SEQ ID NO: 4948 (700456061H1), SEQ ID NO: 4355 (700454907H1), SEQ ID NO: 4894 (700455964H1), SEQ ID NO: 5485 (700457120H1), SEQ ID NO: 4586 (700455286H1), SEQ ID NO: 4410 (70045500lH1), SEQ ID NO: 4375 (700454941H1), SEQ ID NO: 4251 (700454684H1), SEQ ID NO: 6278 (700458802H1), SEQ ID NO: 4880 (700455943H1), SEQ ID NO: 5092 (700456346H1), SEQ ID NO: 4830 (700455863H1), SEQ ID NO: 4827 (700455858H1), SEQ ID NO: 5219 (700456619H1), SEQ ID NO: 5629 (700457371H1), SEQ ID NO: 5404 (700456971H1), SEQ ID NO: 4525 (700455183H1), SEQ ID NO: 4312 (700454820H1), SEQ ID NO: 3860 (700453944H1), SEQ ID NO: 5676 (700457457H1), SEQ ID NO: 5673 (700457451H1), SEQ ID NO: 5915 (700457969H1), SEQ ID NO: 5108 (700456369H1), SEQ ID NO: 4115 (700454443H1), SEQ ID NO: 4518 (700455174H1), SEQ ID NO: 4359 (700454913H1), SEQ ID NO: 5493 (700457130H1), SEQ ID NO: 4057 (700454344H1), SEQ ID NO: 4975 (700456105H1), SEQ ID NO: 3803 (700453835H1), SEQ ID NO: 3799 (700453827H1), SEQ ID NO: 4953 (700456066H1), SEQ ID NO: 5672 (700457449H1), SEQ ID NO: 4290 (700454767H1), SEQ ID NO: 3742 (700453733H1), SEQ ID NO: 6290 (700458825H1), SEQ ID NO: 6248 (700458643H1).

[0063] Analogous to the nucleic acid sequences, a CDP may have an amino acid sequence which is naturally occurring, synthetic, or variant. Guidance in determining which amino acid residues may be substituted, inserted, or deleted without abolishing biological or immunological activity may be found using computer programs such as LASERGENE Navigator (DNASTAR, Madison Wis.) which are well known in the art.

### Derivation of Nucleic Acid Sequences

[0064] In the present embodiment, mRNA was isolated from corn seedling and used to construct the SATMON012 and SATMON029 cDNA libraries. Random cDNA isolates were sequenced in part and analyzed using the homology programs described below. The sequences of the isolates are disclosed in the Sequence Listing. These cdps may contain either a partial or a full length open reading frame, or they may contain all or part of a regulatory element for a particular gene. This variation is attributed to the fact that many genes are several hundred, and sometimes several thousand, bases in length. With current technology, large genes cannot be cloned in their entirety because of vector limitations, incomplete reverse transcription of the first strand, or incomplete replication of the second strand. This is particularly common in libraries generated by random priming, since first strand synthesis may begin anywhere within the transcript. Contiguous, secondary clones containing additional nucleotide sequences may be obtained using a variety of methods known to those of skill in the art.

### Sequencing of the cDNAs

[0065] Methods for DNA sequencing are well known in the art. Conventional enzymatic methods employ DNA polymerase, Klenow fragment, THERMO SEQUENASE DNA polymerase (Amersham Pharmacia Biotech, Piscataway N.J.), or Taq DNA polymerase (Amersham Pharmacia Biotech) to extend the nucleic acid sequence from an oligonucleotide primer annealed to the DNA template of interest. Methods have been developed for the use of both single-stranded and double-stranded templates. Chain termination reaction products may be electrophoresed on urea-polyacrylamide gels and detected either by autoradiography (for radionucleotide-labeled nucleotides) or by fluorescence (for fluorescent-labeled nucleotides). Recent improvements in mechanized reaction preparation, sequencing, and analysis using the fluorescent detection method have permitted expansion in the number of inserts that may be sequenced per day using machines such as the ABI 377 DNA Sequencer (Perkin Elmer, Norwalk Conn.).

### Reading Frame Determinations

[0066] The reading frame of the nucleotide sequence may be ascertained by several types of analyses. First, reading frames contained within the coding sequence may be analyzed for the presence of start (ATG, GTG, etc.) and stop codons (TGA, TAA, TAG). Typically, one reading frame will continue throughout the major portion of a cDNA sequence while the other two reading frames tend to contain numerous stop codons. For more difficult cases, algorithms have been created to analyze the occurrence of individual nucleotide bases at each putative codon triplet (Fickett, J. W. (1982) Nucl. Acids Res. 10:5303-5318). Coding sequences for particular organisms (bacteria, plants, and animals) tend to contain certain triplet periodicities, such as a significant preference for pyrimidines in the third codon position. These preferences have been incorporated into widely available software which may be used to determine the coding potential and frame of a given stretch of DNA. Coding preferences and start/stop codon information may be used to determine proper frame with a high degree of certainty which, in turn, permits cloning of the sequence in the correct frame.

[0067] The nucleotide sequences of the Sequence Listing have been prepared by current, state-of-the-art, automated methods and, as such, may contain occasional sequencing errors and unidentified nucleotides. Such unidentified nucleotides are designated by an N. The infrequent sequencing errors or N's in the nucleotide sequences of the Sequence Listing do not present a problem to those skilled in the art who wish to practice the invention. Several methods employing standard recombinant techniques, described in Ausubel, F. M. et al. (1997; Short Protocols in Molecular Biology, John Wiley & Sons, New York N.Y.), Sambrook, J. et al. (1989; Molecular Cloning, A Laboratory Manual, Cold Spring Harbor Press, Plainview N.Y.), or periodic updates thereof, may be used to correct errors and complete the missing sequence information. The same techniques used for obtaining a full-length sequence may be used to obtain a complete and accurate nucleotide sequence.

### Homology Searches

[0068] The nucleic acid sequences of the Sequence Listing were used as query sequences against GenBank, or other databases available to the public, to determine homology to known sequences. Illustrative of computer programs known to those of skill in the art for performing computer-assisted nucleic acid or amino acid homology searches is the program Basic Local Alignment Search Tool or BLAST (Altschul, S. F. (1993) J. Mol. Evol. 36:290-300; Altschul, et al. (1990) J. Mol. Biol. 215:403-410). BLAST produces alignments of both nucleotide and amino acid sequences to determine sequence similarity. BLAST is especially useful in determining exact matches or homology. GenBank databases may be searched for sequences containing regions of homology to a query cdp of the present invention. Other databases (such as SwissProt, BLOCKS, or Pima II) may be searched for regions of amino acid sequence homology corresponding to the deduced CDP.

[0069] As described in Karlin (supra), the fundamental unit of BLAST algorithm output is the High-scoring Segment Pair (HSP). An HSP consists of two sequence fragments of arbitrary, but equal lengths, whose alignment is locally maximal and for which the alignment score meets or exceeds a threshold or cutoff score set by the user. The parameter E establishes the statistically significant threshold for reporting database sequence matches. E is interpreted as the upper bound of the expected frequency of chance occurrence of an HSP (or set of HSPs) within the context of the entire database search. Any database sequence whose match satisfies E is reported in the BLAST program output.

[0070] BLAST may be used with any of the cdps of the present invention to search for HSPs between a query sequence and sequences in a reference nucleotide or protein database. The statistical significance of any matches is evaluated, and those matches that satisfy the user-selected threshold of significance are reported.

[0071] Homologous sequences, as determined by a BLAST search, may include prokaryotic (bacterial) or eukaryotic (animal, fungal, or plant) sequences. Where a cdp represents only part of a gene, the degree of homology is based only on the partial sequence disclosed in the Sequence Listing. When sequences have sufficiently long regions of agreement or sufficiently high overall agreement, the score of the cdp is considered to be a nearly exact match. Allelic sequences fit this category when they only differ by about three nucleotides per 100. Homologous matches between the cdps provided in the Sequence Listing and the GenBank databases are reported in TABLES 1 and 2.

### Corn Seedling-Derived Sequences

[0072] The cdps of the present invention may serve to identify, evaluate, alter, or follow the inheritance of desired characteristics associated with growth and development, disease resistance, environmental adaptability, quality, and yield of corn. In particular, cdps are useful as molecular markers for studying inheritance of multigene traits in a plant breeding program.

### Hybridization and Genetic Analysis

[0073] The cdps, their oligonucleotides, fragments, or complementary sequences, may be used to identify the presence of and/or to determine the degree of similarity between two (or more) nucleic acid sequences. The cdps may be hybridized to naturally occurring or recombinant nucleic acid sequences under appropriately selected temperatures and salt concentrations. Hybridization with a probe based on the nucleic acid sequence of at least one of the cdps allows for the detection of nucleic acid sequences, including genomic sequences, which are identical or closely homologous to the cdps of the Sequence Listing. Probes may be selected from non-conserved or unique regions of the cdps of interest and pretested for their ability to identify or amplify the target nucleic acid sequence using standard protocols. Optimization of the protocol, e.g. increasing stringency to reduce the frequency of false positives or avoiding polyadenylated or other regions predicted to provide secondary structure to reduce false negatives, should provide the desired results. A labeled probe may be used to detect or quantify cDNAs, endogenous corn transcripts, or genes. As will be understood by those of skill in the art, hybridization conditions, probe length and labeling will vary depending upon the intended use. Hybridization conditions, based on the melting temperature (Tm) of the probe and on the salt concentrations under which hybridization and subsequent washes are carried out are well known in the art and are taught in Sambrook (supra) and Ausubel (supra).

[0074] A probe for use in Southern or northern hybridization may be a cdp sequence or its complement that is up to several hundred nucleotides long and either single-stranded or double-stranded. Such probes may be hybridized in solution to biological materials such as plasmids, bacterial or yeast artificial chromosomes, cleared plant tissues, etc. or to artificial substrates containing cdps. Microarrays are particularly suitable for identifying the presence and detecting the level of gene expression of multiple desired traits by examining gene expression of selected inbreds and hybrids at various stages of development. An array analogous to a dot or slot blot may be used to arrange and link the cDNA fragments or oligonucleotides to the surface of a substrate using one or more of the following: mechanical (vacuum), chemical, thermal, or UV bonding procedures. Such an array may contain any number of cdps and may be produced by hand or by using available devices, materials, and machines.

[0075] Probes may be labeled by either PCR or enzymatic techniques using a variety of reporter molecules. Commercial kits are available for radioactive labeling and probe cleanup from Amersham Pharmacia Biotech, for alkaline phosphatase labeling from Life Technologies (Rockville Md.), for chemiluminescent labeling from Lumigen (Southfield Mich.), etc. Alternatively, cdps may be cloned into commercially available vectors for the production of RNA probes. Such probes may be transcribed in the presence of at least one labeled nucleotide (e.g. [α⁻³²P] CTP, Amersham Pharmacia Biotech).

[0076] Genetic maps, based upon molecular markers (restriction fragment length polymorphisms, RFLPs) are being assembled for several grains including rice, corn, barley, and wheat. These maps have improved understanding and manipulation of both single and multigene traits. Even when the genes involved are unknown, the ability to show the presence of the associated marker and the desired characteristics in inbred or hybrid corn plants and to follow segregation in a breeding program make the marker valuable as a diagnostic. Moreover, continuous variation within a segregating family may often be resolved into a handful of major gene effects associated with molecular markers. As genetic maps merge with physical maps, it becomes possible to walk along the chromosome and clone virtually any gene. Hybridization and newer technologies such as random amplified polymorphic DNA (RAPD) analysis, microsatellites and amplified fragment length polymorphisms (AFLP) make it easier to isolate the actual genes which interact and are responsible for a desired trait.

### Diagnostic Uses

[0077] Diagnostic assays known to those of skill in the art may be used to detect or confirm conditions or diseases associated with abnormal levels of cdp expression. Labeled probes developed from the nucleotide sequence encoding a cdp are added to a plant sample under amplifying or hybridizing conditions. The complex between the naturally occurring sequence and the labeled probe is quantified and compared with a standard for that cell or tissue. If cdp expression varies significantly from the standard, the assay indicates the presence of the condition or disease. Qualitative or quantitative diagnostic methods may include northern, dot blot, or other membrane or dip-stick based technologies or multiple-sample format technologies such as PCR, ELISA-like, pin, or chip-based assays. The determination of whether cdp expression in a sample varies significantly from a standard is determined by methods of statistical analyses well known to those of skill in the art.

[0078] Accordingly, the invention provides a method for assessing disease resistance or other conditions using a panel of probes. A candidate probe is identified from CDPs which are specific to corn tissue and have not been observed in GenBank or other Incyte-sequenced cDNA libraries. The usefulness of the probe may be tested by quantifying its hybridization across tissues which are normal versus diseased. Once an increase (or decrease) in expression level is related to a trait such as fungal resistance, the probe can be used to monitor ability of a particular inbred or hybrid corn line to withstand fungal infection.

### Transcript Imaging

[0079] Another embodiment relates to development of diagnostic or treatment methods based on specific imaging of the cdps of the present invention. The profile of nucleic acid sequences which reflect gene transcription activity in a particular cell type, tissue, or plant at a particular time, is defined as a “transcript image”. Such profiles are generated by naming, matching, and counting all copies of related clones and arranging them in order of abundance.

[0080] Clones may also be arranged in clusters in descending order of abundance. The minimum number of clones necessary to constitute a cluster, as illustrated at the bottom of TABLE 2, is two. All clones in TABLE 2 are seedling specific although individual clusters may consist of either unique cdps or cdps that are homologous to known sequences. An alternative presentation of this data might involve a spreadsheet which contains cluster abundance data as well as some descriptive information for the homologous clones.

[0081] Subtractions, or subsetting, among transcript images may be used to discern various differences in gene expression and cellular activities. For example, subsetting may be used with the PHYTOSEQ database (Incyte Pharmaceuticals, Palo Alto Calif.) to show differences between: a) organs of two different developmental stages; b) two different organs, such as leaves and roots; c) organs from two different species; or d) normal and diseased or stressed plant tissues.

[0082] Large numbers of mRNA transcripts, as represented by their respective cDNA clones, may be compared using computational methods rather than analogous laboratory methods, such as northern blot analysis. For example, electronic subtraction between any two transcript images parallels hybrid subtraction between any two cDNA libraries (cf. Sambrook, supra). The information produced by the subtraction of transcript images between different libraries may be used to select single or multiple cdps which may be used to predict yield.

[0083] A cdp identified through transcript imaging, or other means, may also be used to clone regulatory elements for use in transformation vectors. Expression may be quantified using amplification or microarray technologies which are well known in the art.

### Complementary Strand

[0084] The cdp, or any part thereof, may be used as a tool in technologies for altering gene expression. To inhibit in vivo or in vitro cdp transcription, a PNA (Nielsen, P. E. et al. (1993) Anticancer Drug Des. 8:53-63) or an oligonucleotide based on the sequence of a cdp is designed using OLIGO 4.06 software (National Biosciences, Plymouth Minn.) or LASERGENE Navigator (DNASTAR). Alternatively, a fragment of a cdp is cloned into an expression vector which is transformed into a host cell to express the complementary strand. An analogous molecule may be designed to inhibit promoter binding in the upstream nontranslated leader or at various sites along the 5′ coding region of the cdp. Alternatively, complementary molecules may be designed to inhibit translation of an mRNA by preparing an oligomer or fragment which binds to the transcript preventing its association with the ribosomal machinery.

[0085] Complementary molecules may also be designed to disrupt genomic sequences (such as enhancers, introns) preventing the normal activity of these regulatory elements. Similarly, complementary strands may be used in a process known as “triple helix” base pairing to inhibit replication. These molecules compromise the ability of the double helix to open and bind to polymerases and transcription factors necessary for replication.

[0086] Stable transformation of appropriate dividing cells with an expression vector encoding the complement of a cdp may produce a transgenic cell line, tissue, or organism. Those cells which assimilate, replicate, and express the nucleic acid sequence in sufficient quantities may compromise or entirely eliminate the natural activity of the cdp. Frequently, the function of a cdp may be ascertained by observing lethality, loss of physiological activity, changes in morphology, etc. at the cellular, tissue, organ, or organismal level.

### Expression

[0087] The cdps may be used in recombinant vectors to express a polypeptide. It may be advantageous to design nucleic acid sequences possessing the GC ratio of codons preferred by a particular prokaryotic or eukaryotic host (Murray, E. et al. (1989) Nuc. Acids Res. 17:477-508). In addition, 3′ terminators, such as bacterial nopalene synthase or octapine synthase, may be modified, or substituted into vectors, to produce transcripts having more desirable properties, such as a longer half-life, than transcripts produced from the naturally occurring sequence (Sullivan, M. L. and Green, P. J. (1993) Plant Mol. Biol. 23:1091-1104; Silva, E. M. et al. (1987) J. Cell Biol. 105:245). The cdps may also be altered by site-directed mutagenesis to insert new restriction sites and to modify the peptide by glycosylation, phosphorylation, acetylation, etc.

[0088] The cdp may be ligated to a heterologous sequence to create a chimeric or fusion protein. For ease of purification, it may be useful to produce a fusion protein that is recognized by a commercially available antibody. In addition, the sequence may be engineered to introduce a cleavage site between the peptide of interest and the heterologous protein sequence, so that the peptide may be cleaved from the heterologous moiety and purified.

[0089] Alternately, the peptide may be synthesized, whole or in part, using chemical methods well known in the art. For example, peptides may be synthesized using various solid-phase techniques (Roberge, J. Y. et al. (1995) Science 269:202-204) or an Peptide Synthesizer Model 431A (Perkin Elmer) using instructions provided by the manufacturer. Once synthesized, the peptide may be purified by preparative high performance liquid chromatography, and composition confirmed by amino acid sequencing (Ausubel (supra) p. 10.82f).

### Expression Systems

[0090] For protein expression, the nucleic acid sequence may be inserted into an expression vector which contains the necessary elements for appropriate transcription and translation. Methods which are well known to those skilled in the art may be used to construct such vectors. These methods include in vitro recombinant DNA techniques, synthetic techniques, in vivo recombination, or genetic recombination. Such techniques are described in Sambrook (supra) and Ausubel (supra). One of the advantages of producing the CDPs by recombinant DNA technology is the ability to obtain highly-enriched sources of the polypeptides that simplify purification procedures.

[0091] The cdps may be engineered into a variety of expression vectors and host cells. These include, but are not limited to, microorganisms such as bacteria transformed with recombinant bacteriophage, plasmid or cosmid DNA expression vectors; yeast transformed with yeast expression vectors; insect cell systems infected with virus expression vectors (e.g. baculovirus); plant cells transfected with expression vectors containing viral, bacterial, or eukaryotic elements (e.g. cauliflower mosaic virus, CaMV; Ti or pBR322 plasmids; and cell or seedling-specific, constitutive or inducible, monocot or corn elements).

[0092] The regulatory elements of vectors vary in their strength and specificities and are those nontranslated regions such as enhancers, promoters, introns, and 3′ untranslated regions which interact with host proteins to carry out transcription and translation. Depending on the vector and host, any number of suitable transcription and translation elements may be used. For example, promoters or enhancers derived from the genomes of plant cells (e.g. heat shock, RUBISCO; and storage protein genes) or from plant viruses (e.g. viral promoters or leader sequences) may be cloned into the vector containing an appropriate selectable marker. In fact, the cdps of this invention may be used to clone upstream, tissue-specific or inducible regulatory elements for purposes of engineering and expressing heterologous genes in corn.

[0093] In a bacterial system, an expression vector may be selected to direct a high level expression of a fusion protein. Commercial vectors include, but are not limited to, the multifunctional E. coli cloning and expression vectors, PBLUESCRIPT (Stratagene, La Jolla Calif.) and PSPORT (Life Technologies). Using either of these vectors, the nucleic acid sequence may be ligated into the vector in-frame with sequences for the amino-terminal Met and the subsequent 7 residues of β-galactosidase so that a chimeric protein is produced. PGEX vectors (Amersham Pharmacia Biotech) may also be used to express peptides by ligating the nucleic acid sequence to glutathione S-transferase (GST). In general, such fusion proteins are soluble and may easily be purified from lysed cells by adsorption to glutathione-agarose beads followed by elution in the presence of free glutathione. Proteins made in such systems are designed to include heparin, thrombin, or factor X_{A} protease cleavage sites so that the peptide of interest may be released from the GST moiety at will.

[0094] In plants, the expression of nucleic acid sequences may be driven by any of a number of promoters. Viral promoters such as the 35S and 19S promoters of CaMV may be used alone or in combination with the omega leader sequence from TMV (Takamatsu, N. et al. (1987) EMBO J. 6:307-311). Alternatively, plant promoters such as the small subunit of RUBISCO (Coruzzi, G. et al. (1984) EMBO J. 3:1671-1680; Broglie, R. et al. (1984) Science 224:838-843); or heat shock promoters (Winter, J. and Sinibaldi, R. M. (1991) Results Probl. Cell Differ. 17:85-105) may be used. Preferably, the cdps of the invention may be used to identify clones containing full length genes by hybridization or to clone full length genes or regulatory elements for use in expression vectors by PCR.

### X-Ray Crystallography

[0095] Expression of the recombinant CDP in sufficient amounts may make analytical studies such as X-ray crystallography possible. In the alternative, knowledge of the amino acid sequence deduced from the nucleic acid sequence may provide guidance to those employing computer modeling techniques in place of or in addition to X-ray crystallography.

### Antibodies

[0096] Anti-CDP antibodies may be produced to use in assays of protein expression. Such antibodies include, but are not limited to, polyclonal, monoclonal, chimeric, single chain, Fab fragments and fragments produced by a Fab expression library. Neutralizing antibodies, i.e., those which inhibit dimer formation, are especially useful for diagnostics.

[0097] The amino acid sequence encoded by the cdps of the Sequence Listing may be analyzed by appropriate software (e.g. LASERGENE Navigator, DNASTAR) to determine regions of high immunogenicity. The optimal sequences for immunization are selected from the C-terminus, the N-terminus, and those intervening, hydrophilic regions of the peptide which are likely to be exposed to the external environment when the peptide is in its natural conformation. Analysis used to select appropriate epitopes is also described by Ausubel (supra, unit 11-7). Peptides used for antibody induction do not need to have biological activity; however, they must be antigenic. Peptides used to induce specific antibodies may have an amino acid sequence consisting of at least five amino acids, and preferably at least 10 amino acids. An oligopeptide should mimic an antigenic portion of the natural peptide and may be fused with another protein such as KLH (Sigma-Aldrich) for antibody production. An oligopeptide or peptide encompassing an antigenic region may be expressed from the nucleic acid sequence, synthesized, or purified from corn.

[0098] Procedures well known in the art may be used for the production of antibodies. Various hosts including mice, goats, and rabbits, may be immunized by injection with a peptide or oligopeptide. Depending on the host species, various adjuvants may be used to increase immunological response.

[0099] In one procedure, oligopeptides about 15 residues in length may be synthesized using a Peptide Synthesizer Model 431A (Perkin Elmer) using Fmoc-chemistry and coupled to KLH (Sigma-Aldrich) by reaction with M-maleimidobenzoyl-N-hydroxysuccinimide ester (Ausubel, supra). If necessary, a cysteine may be introduced at the N-terminus of the oligopeptide to permit coupling to KLH. Rabbits are immunized with the oligopeptide-KLH complex in complete Freund's adjuvant. The resulting antisera are tested for antipeptide activity by binding the peptide to plastic, blocking with 1% BSA, reacting with rabbit antisera, washing, and reacting with radioiodinated goat anti-rabbit IgG.

[0100] In another procedure, the peptide, in quantities up to 75 mg, may be used to immunize mice or rabbits. About 100 μg are used to immunize a mouse, while up to 1 mg is used to immunize a rabbit. Subsequently, the peptide is radioiodinated and used to screen the B-lymphocyte cells from the immunized animal for production of hybridomas using standard techniques. About 20 mg of protein are sufficient for labeling and screening several thousand clones.

[0101] Hybridomas may also be prepared and screened using standard techniques. Hybridomas of interest are detected by screening with radioiodinated peptide to identify those fusions producing peptide-specific monoclonal antibody. In a typical protocol, wells of microtiter plates are coated with affinity-purified, specific rabbit-anti-mouse (or suitable anti-species IgG) antibodies at 10 mg/ml. The coated wells are blocked with 1% BSA and washed and exposed to supernatants from hybridomas. After incubation, the wells are exposed to radiolabeled peptide at 1 mg/ml. Clones producing antibodies bind a quantity of labeled peptide that is detectable above background.

[0102] Such clones are expanded and subjected to 2 cycles of cloning at 1 cell/3 wells. Cloned hybridomas are injected into pristane-treated mice to produce ascites, and monoclonal antibody is purified from the ascitic fluid by affinity chromatography on Protein A (Amersham Pharmacia Biotech). Monoclonal antibodies with affinities of at least 10⁸ M⁻¹, preferably 10⁹ M⁻¹ to 10¹⁰ M⁻¹ or greater, are made by standard procedures as described in Harlow (1988; Antibodies: A Laboratory Manual, Cold Spring Harbor Laboratory, Cold Spring Harbor N.Y.) and Goding (1986; Monoclonal Antibodies: Principles and Practice, Academic Press, New York N.Y.).

[0103] Antibody fragments which contain specific binding sites for an epitope may also be generated. For example, such fragments include, but are not limited to, the F(ab′)2 fragments which may be produced by pepsin digestion of the antibody molecule and the Fab fragments which may be generated by reducing the disulfide bridges of the F(ab′)2 fragments. Alternatively, Fab expression libraries may be constructed to allow rapid and easy identification of monoclonal Fab fragments with the desired specificity (Huse, W. D. et al. (1989) Science 256:1275-1281).

### Assays Using Antibodies

[0104] Anti-CDP antibodies may be used to determine the amount of CDP found in a particular cell of a corn inbred line or hybrid under various environmental or disease conditions. Assays for such peptides include methods utilizing the antibody and a label to detect expression in plant extracts, cells, or tissues. The peptides and antibodies of the invention may be used with or without modification. Frequently, the peptides and antibodies will be labeled by joining them, either covalently or noncovalently, with a reporter molecule.

[0105] Protocols for detecting and measuring protein expression using either polyclonal or monoclonal antibodies, are known in the art. Examples include enzyme-linked immunosorbent assay (ELISA), radioimmunoassay (RIA) and fluorescent activated cell sorting (FACS). A two-site, monoclonal-based immunoassay utilizing monoclonal antibodies reactive to two non-interfering epitopes on a peptide is preferred, but a competitive binding assay may be employed. Such immunoassays typically involve the formation of complexes between the CDP and its specific antibody and the measurement of such complexes. These and other assays are described, among other places, in Hampton, R. et al. (1990, Serological Methods, a Laboratory Manual, APS Press, St Paul Minn.) and Maddox, D. E. et al. (1983, J. Exp. Med. 158:1211-1226).

### Screening for Useful Compounds

[0106] The cdps or CDPs are particularly useful for screening libraries of molecules or test compounds for identification of those molecules which bind specifically to them. For example, a cdp or fragment thereof may be combined with a plurality of natural, synthetic, or inorganic molecules to screen for molecules that bind to them and function as transcription factors, enhancers, or other cellular elements which contribute to gene expression. Similarly, a CDP or portion thereof may be combined with a plurality of molecules to screen for molecules which bind to them. Molecules identified by screening with cdps or CDPs preferably affect growth and development, disease resistance, environmental adaptability, quality, or yield.

[0107] Technologies with multiple-sample format, ELISA-like, capillary, or chip-based assays, are well known in the art and allow large-scale screening. These methods use complex formation, quantification, and comparison with a standard to detect molecules which specifically bind the cdps or CDPs. In the assay, the cdp or CDP may be free in solution, affixed to a substrate, borne on a cell surface, or located intracellularly. For example, prokaryotic host cells which are stably transformed with recombinant nucleic acids that express and position a CDP on the cell surface can be used to screen for molecules which specifically bind the CDP. Viable or fixed cells are screened against a plurality of test compounds and the specificity of binding or formation of complexes between an expressed CDP and the test compound is measured.

### Transformation

[0108] Bacterial and plant transformation systems are well known in the art. Expression vectors may be introduced into suitable E. coli cells by electroporation, heat shock or other means as described in Ausubel (supra) for the purpose of expressing a plant protein. Expression vectors may also be introduced into plant cells by direct transfer of DNA or pathogen-mediated transfection. For reviews, see McGraw Hill Yearbook of Science and Technology (1992; McGraw Hill New York N.Y., pp 191-196); or Weissbach, A. and Weissbach, H. (1988; Methods Enzymol. 118:421-463). Direct transfer of DNA into plant protoplasts or cells is one approach for transforming plants genetically. DNA uptake by protoplasts may be promoted chemically with polyethylene glycol or electrically with a high-voltage pulse. Both of these methods depend upon a cell culture system to recover plants from a single transformed cell (Rhodes, C. A. et al. (1988) Biotechnology 6:56-60; Morocz, S. (1991) Theor. Appl. Genet. 80:721-726). Regeneration of transformed, fertile plants has been demonstrated in several cereals including rice (Zhang, H. M. (1988) Plant Cell Rep. 7:379-384).

[0109] Electroporation, lipofection, microinjection, particle bombardment, vacuum infiltration, and electrotransformation may be used to transform corn cells and embryos. Gordon-Kamm, W. J. et al. (1992; Plant Mol. Biol. 18:201-210) used particle bombardment to transform embryogenic, suspension culture cells; Murry, L. E. et al. (In: Bajaj, Y. P. S. (1994) Biotechnolocy in Agriculture and Forestry 25:252-261) used continuous, low voltage electric current to transform embryos; and Rhodes, C. A. et al. (1995; Methods Mol. Biol. 55:121-131) describe the electroporation of embryos. Stable transformation requires the use of an expression vector which contains an appropriate origin of replication and gene cassettes containing viral or plant expression elements, a selectable or visible marker, and a gene of interest. Following the introduction of the vector, cells may be allowed to grow for 1-2 days in an enriched media. If the vector contains a selectable marker, the cells are switched to selective media. The selectable marker confers resistance to selective agents and allows growth and recovery of those cells which successfully express the introduced sequences.

[0110] Any number of selection systems may be used to recover transformed cell lines. Antimetabolite, antibiotic or herbicide resistance may be used as the basis for selection using genes such as dhfr, which confers resistance to methotrexate (Wigler, M. et al. (1980) Proc. Natl. Acad. Sci. 77:3567-3570); npt, which confers resistance to the aminoglycosides, neomycin and G-418 (Colbere-Garapin, F. et al. (1981) J. Mol. Biol. 150:1-14); and als or pat, which confer resistance to chlorsulfuron and phosphinotricin acetyltransferase, respectively (McGraw Hill Yearbook of Science and Technology, supra). Recently, the use of visible markers has gained popularity with such markers as anthocyanins, β glucuronidase and its substrate, GUS, luciferase and its substrate, luciferin, and green fluorescent protein, GFP, being widely used not only to identify transformants, but also to quantify the amount of transient or stable protein expression attributable to a specific vector system (Rhodes (1995) supra; Haseloff, J. and Amos, B. (1995) Trends Genet. 11:328-329). Plant expression vectors contain 5′ promoters, enhancers and 3′ terminators that will function in the plant cell.

### Identification of Transformants

[0111] Although the presence/absence of marker gene expression suggests that the gene of interest is also present, its expression should be confirmed. For example, if the sequence is inserted within a marker gene sequence, cells containing the recombinant sequence may be identified by the absence of marker gene function. Alternatively, a marker gene may be placed in tandem with the nucleic acid sequence under the control of a single promoter. Expression of the marker gene in response to induction or selection may indicate the presence and expression of the tandem sequence as well.

[0112] Alternatively, host cells which contain the introduced nucleic acid sequence may be identified by a variety of procedures known to those of skill in the art. These procedures include, but are not limited to, DNA-DNA or DNA-RNA hybridization and protein bioassay or immunoassay techniques which include membrane, solution, gel, or chip based technologies for the detection and/or quantification of the nucleic or amino acids and any of the molecules to which they bind.

[0113] The presence of the nucleic acid sequence may be detected by DNA-DNA or DNA-RNA hybridization or amplification using probes comprising all or a portion of a nucleic acid sequence. Nucleic acid amplification based assays involve the use of oligonucleotides or oligomers based on the nucleic acid sequence to detect transformants containing the introduced DNA.

[0114] A wide variety of labels and conjugation techniques are known by those skilled in the art and may be used in various nucleic acid and amino acid assays. Means for producing labeled hybridization or PCR probes for detecting related sequences include oligolabeling, nick translation, end-labeling or PCR amplification and are well known in the art. Alternatively, the nucleic acid sequence may be cloned into a vector for the production of an mRNA probe. Such vectors are known in the art, are commercially available, and may be used to synthesize RNA probes in vitro by addition of an appropriate RNA polymerase such as T7, T3 or SP6 and labeled nucleotides. A number of companies (e.g., Amersham Pharmacia Biotech and Life Technologies) supply commercial kits, reporter molecules, and protocols for these procedures.

### EXAMPLES: ISOLATION, SEQUENCE ANALYSIS AND USE OF CORN SEQUENCES

### I Growth Conditions

[0115] The corn cDNA libraries, SATMON012 and SATMON029 were constructed from corn tissues grown and prepared as follows. SATMON012 seed was planted on moist filter paper in a covered tray and kept in the dark for one day at which time germination had begun. The trays were moved to the bench top with 27° C./21° C., 15hr day/9hr night cycles for two days. At this time the coleorhiza had pushed through the pericarp, and the radicle had just pierced the coleorhiza and was barely visible. The coleoptile had just emerged from the pericarp. The germinating seeds were harvested, frozen immediately in liquid nitrogen, and stored at -80° C.

[0116] SATMON029 seed was planted on moist filter paper in a covered tray and kept in the dark for four days with cycles of 15 hours at 27° C. and nine hours at 21° C. After four days in the dark, all seedlings were etiolated. The radicle had penetrated the coleorhiza and was 4 - 5 cm long; and lateral roots were present. The coleoptile had pushed through the pericarp and was 4 - 5 cm long. The tissue was harvested, frozen immediately in liquid nitrogen, crushed, and stored at -80° C.

### II cDNA Library Construction

[0117] The frozen tissue from SATMON012 and SATMON029 respectively was homogenized, and total RNA was extracted with TRIZOL reagent (Life Technologies). Polyadenylated RNA was isolated from the total RNA using a magnetic Dynabeads mRNA purification kit (Dynal Inc, Lake Success N.Y.). The mRNA was handled according to the recommended protocols in the SuperScript Plasmid System for cDNA synthesis and plasmid cloning (Life Technologies). The cDNAs for SATMON012 were fractionated on a SEPHAROSE CL-4B column (Amersham Pharmacia Biotech), and those cDNAs exceeding 400 bp were ligated into the NotI and SalI sites of the PSPORT1 plasmid (Life Technologies). The plasmid PSPORT1 was subsequently transformed into DH10B competent cells (Life Technologies). The cDNAs for SATMON029 were fractionated on a SEPHAROSE CL-4B column (Amersham Pharmacia Biotech), and those cDNAs exceeding 400 bp were ligated into pINCY 1 (Incyte Pharmaceuticals). The plasmid pINCY 1 was subsequently transformed into DH10B competent cells (Life Technologies).

### III Isolation and Sequencing of cDNA Clones

[0118] The plasmid DNA was released from the cells and purified using the R.E.A.L. Prep 96 plasmid kit (Qiagen, Valencia Calif.). This kit enabled the simultaneous purification of 96 samples in a 96-well block using multi-channel reagent dispensers. The recommended protocol was employed except for the following changes: 1) the bacteria were cultured in 1 ml of sterile Terrific Broth (Life Technologies) with carbenicillin at 25 mg/l and glycerol at 0.4%; 2) after inoculation, the cultures were incubated for 19 hours and at the end of incubation, the cells were lysed with 0.3 ml of lysis buffer; and 3) following isopropanol precipitation, the plasmid DNA pellet was resuspended in 0.1 ml of distilled water. After the last step in the protocol, samples were transferred to a 96-well block for storage at 4° C.

[0119] In the alternative, DNA was isolated using the following protocols. Single bacterial colonies were transferred into individual wells of the 384-well plates (Genetix, Christchurch UK) using sterile toothpicks. The wells contained 1 ml of sterile Terrific Broth (Life Technologies) with 25 mg/l carbenicillin and 0.4% glycerol (v/v). The plates were covered and placed in a THERMODYNE incubator (Thermodyne Corp, Newtown Square Pa.) at 37° C for 8-10 hours prior to use. Plasmid DNA was released from the cells and amplified using direct link PCR (Rao, V. B. (1994) Anal. Biochem. 216:1-14) as follows. The direct link PCR solution included 30 ml of NUCLEIX PLUS PCR nucleotide mix (Amersham Pharmacia Biotech) and 300 μl of Taq DNA polymerase (Amersham Pharmacia Biotech) with or without 12 μl Pfu DNA polymerase (Stratagene). Five microliters of the PCR solution were added to each of the 384 wells using the Hydra-96 microdispenser (Hamilton, Reno Nev.); plates were centrifuged at 1000 rpm for 20 seconds and refrigerated until use. A 384 pin tool (V&P Scientific, San Diego Calif.) was used to transfer bacterial cells from the incubation plate into the plate containing the PCR solution where the component 0.1% Tween 20 (polyoxyethylene(20)sorbitan monolaurate) caused the cells to undergo lysis and release the plasmid DNA. After lysis, the plates were centrifuged up to 500 rpm, covered with a cycle sealer, and cycled using a 384-well Peltier Thermal Cycler (PCT-200; MJ Research, Watertown Mass.) using the program dPCR30 with the following parameters: Step 1) 95° C., 1 minute; Step 2) 94° C., 30 seconds; Step 3) 55° C., 30 seconds; Step 4) 72° C., 2 minutes; Step 5) steps 2, 3, and 4 repeated 29 times; Step 6) 72° C., 10 minutes; and Step 7) storage at 4° C.

[0120] The concentration of DNA in each well was determined by dispensing 100 μl PICOGREEN quantitation reagent (Molecular Probes, Eugene Oreg.) (0.25% reagent dissolved in 10 mM TrisHCl, pH 7.5, 1 mM ethylenediamine tetraacetic acid (EDTA) (1x TE, v/v), and 0.5 μl of undiluted PCR product into each well of an opaque fluorimeter plate (Corning Costar, Acton Mass.) and allowing the DNA to bind to the reagent. The plate was scanned in a Fluoroskan II (Labsystems Oy, Helsinki, Finland) to measure the fluorescence of the sample and to quantify the concentration of DNA.

[0121] The cDNAs were prepared and sequenced by the method of Sanger, F. and A. R. Coulson (1975; J. Mol. Biol. 94:441-448), using either a MICROLAB 2200 system (Hamilton) or a HYDRA microdispenser (Robbins Scientific, Sunnyvale Calif.) in combination with PTC-200 cyclers (MJ Research) and ABI PRISM 377 DNA sequencing systems (Perkin Elmer). Most of the isolates were sequenced according to standard PE protocols and kits (Cat. #79345, 79339, 79340, 79357, 79355). The solution volumes were used at 0.25x - 1.0x concentrations. In the alternative, cDNAs may have been sequenced using solutions and dyes from Amersham Pharmacia Biotech.

### IV Homology Searching of cDNA Clones and Their Deduced Proteins

[0122] After the reading frame was determined, the nucleotide sequences of the Sequence Listing or their deduced amino acid sequences were queried against databases such as GenBank, SwissProt, BLOCKS, and Pima II. These databases which contain annotated sequences were searched for regions of homology (similarity) using BLAST (Altschul (1993) supra; Altschul (1990) supra).

[0123] BLAST produced alignments of both nucleic and amino acid sequences to determine sequence similarity. Because of the local nature of the alignments, BLAST was especially useful in determining exact matches or in identifying homologs of viral, prokaryotic, or eukaryotic origin. Other algorithms such as the one described in Smith, T. F. (1992; Protein Engineering 5:35-51) could have been used to deal with primary sequence patterns and secondary structure gap penalties. The sequences disclosed in this application have lengths of at least 49 nucleotides, and no more than 12% uncalled bases (where N is recorded rather than A, C, G, or T).

[0124] SATMON012 and SATMON029 nucleotide sequences were searched, as described in Karlin (supra), against the GenBank plant (pln) and eukaryote (eukp) databases, and deduced amino acid sequences from the same clones were then searched against GenBank functional protein databases (allp). The relevant database for a particular match was reported in column 5 of TABLE 1. In TABLE 1 column 3, the product score is calculated as follows: the % nucleotide or amino acid identity [between the query and reference sequences] in BLAST is multiplied by the % maximum possible BLAST score [based on the lengths of query and reference sequences] and then divided by 100. In an analogy to the hybridization procedures used in the laboratory, the electronic stringency for an exact match was set at 70, and the conservative lower limit for an exact match was set at approximately 40 (with 1-2% error due to uncalled bases). Column 4 provides log-likelihood where the value=log (probability÷threshold) and the threshold for exact matches was set at 10⁻²⁵ for nucleotides and 10⁻¹⁴ for peptides. Column 6 contains a GenBank description of the protein; some of the GenBank descriptions were standardized with respect to abbreviations and spelling.

### V Gene Transcript Analysis

[0125] The abundance sort program of the invention described in U.S. Pat. No. 5,840,484 entitled “Comparative Gene Transcript Analysis”, incorporated herein by reference, tabulates and sorts by frequency the mRNA transcripts corresponding to each gene identified in a database. The process for obtaining this data set, the profile of corn seedling gene activity or transcript image, is referred to as “gene transcript analysis”.

[0126] A transcript analysis summarizes the presence and abundance of exact, unique, and homologous transcripts which are seedling specific. A transcript image may be assembled using TABLE 1, TABLE 2, and the Sequence Listing. Such a collection of sequences is used to characterize minimally active, active, or highly active cdps. Comparisons among normal, diseased, or immature seedling are used to identify those sequences of particular use in predicting yield or in recovering regulatory elements to be used in vectors for genetic engineering. The entire set, or a selected subset, of seedling-specific, unique, or homologous cDNAs may be useful in membrane-based or PCR-based diagnostic technologies.

### VI Library Comparisons, Subsetting

[0127] LIFESEQ database (Incyte Pharmaceuticals) software is used to compare sets of transcript images for PHYTOSEQ database (Incyte Pharmaceuticals) cDNA libraries. The cdps are filtered by selecting desired values for relative abundance, stringency, and/or product score (described infra). For any particular library, only the subset of cdps that meet the selected values is included in the comparison. Additional filters, such as those to exclude common genes, such as ribosomal proteins, elongation factor, etc. may be used in the search operation. The subsetting of thousands of corn sequences from the transcript images of callus, ear, embryo, endosperm, leaf, meristem, root, seed, seedling, stem, and tassel libraries is used to identify cdps which are of interest.

### VII. Extension of CDNA Sequences

[0128] The nucleic acid sequence was extended using an Incyte cDNA clone and oligonucleotide primers. One primer was synthesized to initiate 5′ extension of the known fragment, and the other, to initiate 3′ extension of the known fragment. The initial primers were designed using OLIGO 4.06 software (National Biosciences), or another appropriate program, to be about 22 to 30 nucleotides in length, to have a GC content of about 50% or more, and to anneal to the target sequence at temperatures of about 68° C. to about 72° C. Any stretch of nucleotides which would result in hairpin structures and primer-primer dimerizations was avoided.

[0129] Selected plant cDNA libraries were used to extend the sequence. If more than one extension was necessary or desired, additional or nested sets of primers were designed. Preferred libraries are ones that have been size-selected to include larger cDNAs. Also, random primed libraries are preferred because they will contain more sequences with the 5′ and upstream regions of genes. A randomly primed library may be particularly useful if an oligo d(T) library does not yield a full-length cDNA. Genomic libraries are useful for extension 5′ of the promoter binding region in obtaining regulatory elements.

[0130] High fidelity amplification was obtained by PCR using methods well known in the art. PCR was performed in 96-well plates using the PTC-200 cycler (MJ Research). The reaction mix contained DNA template, 200 nmol of each primer, reaction buffer containing Mg²⁺, (NH₄)₂SO₄, and β-mercaptoethanol, Taq DNA polymerase (Amersham Pharmacia Biotech), ELONGASE enzyme (Life Technologies), and Pfu DNA polymerase (Stratagene), with the following parameters for primer pair PCI A and PCI B: Step 1: 94° C., 3 min; Step 2: 94° C., 15 sec; Step 3: 60° C., 1 min; Step 4: 68° C., 2 min; Step 5: Steps 2, 3, and 4 repeated 20 times; Step 6: 68° C., 5 min; Step 7: storage at 4° C. In the alternative, the parameters for primer pair T7 and SK+ were as follows: Step 1: 94° C., 3 min; Step 2: 94° C., 15 sec; Step 3: 57° C., 1 min; Step 4: 68° C., 2 min; Step 5: Steps 2, 3, and 4 repeated 20 times; Step 6: 68° C., 5 min; Step 7: storage at 4° C.

[0131] The concentration of DNA in each well was determined by dispensing 100 μl PICOGREEN quantitation reagent (0.25% v/v; Molecular Probes) dissolved in 1x TE and 0.5 μl of undiluted PCR product into each well of an opaque fluorimeter plate (Corning Costar, Acton Mass.) and allowing the DNA to bind to the reagent. The plate was scanned in a Fluoroskan II (Labsystems Oy) to measure the fluorescence of the sample and to quantify the concentration of DNA. A 5 μl to 10 μl aliquot of the reaction mixture was analyzed by electrophoresis on a 1% agarose mini-gel to determine which reactions were successful in extending the sequence.

[0132] The extended nucleotides were desalted and concentrated, transferred to 384-well plates, digested with CviJI cholera virus endonuclease (Molecular Biology Research, Madison Wis.), and sonicated or sheared prior to religation into pUC18 vector (Amersham Pharmacia Biotech). For shotgun sequencing, the digested nucleotides were separated on low concentration (0.6 to 0.8%) agarose gels, fragments were excised, and agar digested with AGARACE enzyme (Promega, Madison Wis.). Extended clones were religated using T4 DNA ligase (New England Biolabs, Beverly Mass.) into pUC18 vector (Amersham Pharmacia Biotech), treated with Pfu DNA polymerase (Stratagene) to fill-in restriction site overhangs, and transfected into competent E. coli cells. Transformed cells were selected on antibiotic-containing media, and individual colonies were picked and cultured overnight at 37° C. in 384-well plates in LB/2x carbenicillin liquid media.

[0133] The cells were lysed, and DNA was amplified by PCR using Taq DNA polymerase (Amersham Pharmacia Biotech) and Pfu DNA polymerase (Stratagene) with the following parameters: Step 1: 94° C., 3 min; Step 2: 94° C., 15 sec; Step 3: 60° C., 1 min; Step 4: 72° C., 2 min; Step 5: steps 2, 3, and 4 repeated 29 times; Step 6: 72° C., 5 min; Step 7: storage at 4° C. DNA was quantified using PICOGREEN reagent (Molecular Probes) as described above. Samples with low DNA recoveries were reamplified using the same conditions described above. Samples were diluted with 20% dimethylsulfoxide (DMSO) (1:2, v/v), and sequenced using DYENAMIC energy transfer sequencing primers and the DYENAMIC DIRECT cycle sequencing kit (Amersham Pharmacia Biotech) or the ABI PRISM BIGDYE Terminator cycle sequencing kit (Perkin-Elmer).

### VIII Labeling of Probes and Hybridization Analyses

### Blotting

[0134] Target nucleic acids are isolated from a biological source and applied to a solid matrix (a blot) suitable for standard nucleic acid hybridization protocols by one of the following methods. A mixture of target nucleic acids, a restriction digest of genomic DNA, is fractionated by electrophoresis through an 0.7% agarose gel in 1x TAE (40 mM Tris acetate, ˜pH 8.5, 2 mM EDTA) running buffer and transferred to a nylon membrane by capillary transfer using 20x saline sodium citrate (SSC). Alternatively, the target nucleic acids are individually ligated to a vector and inserted into bacterial host cells to form a library. Target nucleic acids are then arranged on a blot by one of the following methods. In the first method, bacterial cells containing individual clones are robotically picked and arranged on a nylon membrane. The membrane is placed on bacterial growth medium, LB agar containing carbenicillin, and incubated at 37° C for 16 hours. Bacterial colonies are denatured, neutralized, and digested with proteinase K. Nylon membranes are exposed to UV irradiation in a STRATALINKER UV-crosslinker (Stratagene) to cross-link DNA to the membrane.

[0135] In the second method, target nucleic acids are amplified from bacterial cells by thirty cycles of PCR using primers complementary to vector sequences flanking the insert. Amplified target nucleic acids are purified using SEPHACRYL-400 (Amersham Pharmacia Biotech). Purified target nucleic acids are robotically arrayed onto a glass microscope slide (Corning Science Products, Corning N.Y.). The slide was previously coated with 0.05% aminopropyl silane (Sigma-Aldrich, St. Louis Mo.) and cured at 110° C. The arrayed glass slide (microarray) is exposed to UV irradiation in a STRATALINKER UV-crosslinker (Stratagene).

### Probe Preparation

[0136] cDNA probes are made from mRNA templates. Five micrograms of mRNA is mixed with 1 μg random primer (Life Technologies), incubated at 70° C. for 10 minutes, and lyophilized. The lyophilized sample is resuspended in 50 μl of 1x first strand buffer (cDNA synthesis system; Life Technologies) containing a dNTP mix, [α-³²P]dCTP, dithiothreitol, and MMLV reverse transcriptase (Stratagene), and incubated at 42° C. for 1-2 hours. After incubation, the probe is diluted with 42 μl dH₂O, heated to 95° C. for 3 minutes, and cooled on ice. mRNA in the probe is removed by alkaline degradation. The probe is neutralized, and degraded mRNA and unincorporated nucleotides are removed using a PROBEQUANT G-50 Micro Column (Amersham Pharmacia Biotech). Probes can be labeled with fluorescent markers, Cy3-dCTP or Cy5-dCTP (Amersham Pharmacia Biotech), in place of the radionuclide [³²P]dCTP.

### Hybridization

[0137] Hybridization is carried out at 65° C. in a hybridization buffer containing 0.5 M sodium phosphate (pH 7.2), 7% SDS, and 1 mM EDTA. After the blot is incubated in hybridization buffer at 65° C. for at least 2 hours, the buffer is replaced with 10 ml of fresh buffer containing the probe. After incubation at 65° C. for 18 hours, the hybridization buffer is removed, and the blot is washed sequentially under increasingly stringent conditions, up to 40 mM sodium phosphate, 1% SDS, 1 mM EDTA at 65° C. To detect signal produced by a radiolabeled probe hybridized on a membrane, the blot is exposed to a PHOSPHORIMAGER cassette (Molecular Dynamics, Sunnyvale Calif.), and the image is analyzed using IMAGEQUANT data analysis software (Molecular Dynamics). To detect signals produced by a fluorescent probe hybridized on a microarray, the blot is examined by confocal laser microscopy, and images are collected and analyzed using GEMTOOLS gene expression analysis software (Incyte Pharmaceuticals).

### X Restriction Fragment Length Polymorphisms

[0138] Restriction fragment length polymorphisms (RFLPs) are created by using one or more restriction enzymes to cut DNA into fragments at specific recognition sites. The fragments and molecular size standards are separated using gel electrophoresis. Ethidium bromide staining is used to reveal the fragments under UV (260 nm) illumination. Fragment size differences between samples result from mutations or sequence rearrangements within restriction enzyme recognition sites. RFLP markers are selected by examining these differences (Paterson, A. H. et al. (1988) Nature 335:721-726). Alternative DNA fragments include RAPDs (Welsh, J. and McClelland, M. (1990) Nucleic Acids Res. 18:7213-7218), microsatellites (also called simple sequence repeats; Akkaya, M. S. et al. (1992) Genetics 132:1131-1139) or amplified fragment length polymorphisms (AFLPs; Nandi, S. et al. (1997); Mol. Gen. Genet. 255:1-8). Any of these DNA fragments may be mapped onto a chromosomal map, and all are chosen and used to study multigene traits or quantitative trait loci (QTL) at the intraspecific level or among closely related taxa.

### XI Peptide Expression

[0139] Expression of a corn peptide is accomplished by transforming the multifunctional vector, PSPORT (Life Technologies) or pINCY (Incyte Pharmaceuticals), containing the sequence encoding the peptide into E. coli. A transfected colony is cultured and induced with isopropyl beta-D-thiogalactopyranoside (IPTG) using standard methods. The signal sequence resident in the vector directs the secretion of the peptide into the bacterial growth media. Purification of the peptide using polyacrylamide gel electrophoresis will provide peptide for antibody induction or for use in various assays.

### XII Production of Antibodies

[0140] The amino acid sequence encoded by a cdp is analyzed using LASERGENE Navigator (DNASTAR) to determine regions of high immunogenicity. An oligopeptide of about 15 residues is synthesized using a Peptide Synthesizer Model 431A (Perkin Elmer) using Fmoc-chemistry and coupled to KLH (Sigma-Aldrich) by reaction with M-maleimidobenzoyl-N-hydroxysuccinimide ester (Ausubel, supra). If necessary, a cysteine may be introduced at the N-terminus of the oligopeptide to permit coupling to KLH. Rabbits are immunized with the oligopeptide-KLH complex in complete Freund's adjuvant. The resulting antisera are tested for antipeptide activity, for example, by binding the peptide to plastic, blocking with 1% BSA, reacting with rabbit antisera, washing, and reacting with radioiodinated goat anti-rabbit IgG.

### XIII Two-Hybrid Screen

[0141] A yeast two-hybrid system such as MATCHMAKER LexA Two-Hybrid system (Clontech Laboratories, Palo Alto Calif.) is used to screen for peptides which bind CDPs. A nucleotide encoding a CDP is inserted into the multiple cloning site of a pLexA vector, ligated, and transformed into E. coli. cDNA, prepared from mRNA, is directionally inserted into the multiple cloning site of a pB42AD vector, ligated, and transformed into E. coli to construct a cDNA library. The pLexA plasmid and pB42AD-cDNA library constructs are isolated from E. coli and used in a 2:1 ratio to co-transform competent yeast EGY48[p8op-lacZ] using a polyethylene glycol/lithium acetate protocol. The transformed yeast cells are plated on synthetic dropout (SD) media lacking histidine (-His), tryptophan (-Trp), and uracil (-Ura), and incubated at 30° C. until colonies may be easily counted. The colonies are pooled in a minimal volume of 1x TE (pH 7.5), replated on SD/-His/-Leu/-Trp/-Ura media supplemented with 2% galactose (Gal), 1% raffinose (Raf), and 80 mg/ml X-Gal (X-Gal), and subsequently examined for growth of blue colonies. Interaction between expressed CDP and cDNA fusion proteins activates expression of a LEU2 reporter gene in EGY48 and produces colony growth on media lacking leucine (-Leu). Interaction also activates expression of β-galactosidase from the p8op-lacZ reporter construct which produces blue color in colonies grown on X-Gal.

[0142] Positive interactions between expressed CDP and cDNA fusion proteins can be verified by isolating individual positive colonies and growing them in SD/-Trp/-Ura liquid medium for 1-2 days at 30° C. A sample of the culture is plated on SD/-Trp/-Ura media and incubated at 30° C. until colonies appear. A sample of 20-30 colonies is identically arranged on SD/-Trp/-Ura and SD/-His/-Trp/-Ura plates. Colonies that grow on SD containing histidine but not on media lacking histidine have lost the pLexA plasmid. The histidine-requiring colonies are grown on SD/Gal/Raf/X-Gal/-Trp/-Ura, and white colonies are isolated and propagated. The pB42AD-cDNA plasmid, which contains a polynucleotide encoding a protein which physically interacts with a CDP, can be isolated from the yeast cells and characterized.

### XIV Significant Sequences and Their Uses

[0143] The biological activity of polypeptides encoded by the cdps is based in part on a comparison between nucleic acid sequences in the Sequence Listing and reference or homologous sequences from GenBank which encode polypeptides of known function or activity. The biological properties and potential uses of polypeptides encoded by the cdps are based in part upon the biological properties of their known homologs.

[0144] Incyte Clone No. 700161207H1 is a nonexact homolog of GenBank GI No. gl483218, which encodes AWI 31, a gene specifically induced by wounding in Arabidopsis thaliana (Yang, K. Y. et al.,1997, Mol. Cells 7:131-135).

[0145] Wound-inducible mRNAs were isolated from Arabidopsis thaliana tissues harvested at short intervals after wounding. The mRNAs were used to produce cDNA clones which were classified into two groups according to when they were expressed. For nine clones, mRNA expression had increased within 1 to 1.5 hours after wounding, then declined. One clone, AWI 31, represented steady expression reaching maximum level at 2.5 hours. Yang et al. found that the AWI 31 gene had an open reading frame that predicted a protein of 386 amino acids and showed no significant homology to other known proteins. Northern hybridization using the cDNA revealed that the gene was not affected by other environmental stresses such as drought, high salt, low temperature, or a DPE herbicide treatment. These results suggest that the cDNA clone, AWI 31, was induced specifically by wounding.

[0146] Incyte Clone No. 700161207H1 is defined as a nonexact but functionally related homolog based on a product score of 22 and a log-likelihood value of −13 as shown in TABLE 1. Incyte Clone No. 700161207H1 can be used as a marker of damage/wounding after adverse environmental perturbation that could affect growth and yield.

[0147] All publications and patents mentioned in the above specification are herein incorporated by reference. Various modifications and variations of the described method and system of the invention will be apparent to those skilled in the art without departing from the scope and spirit of the invention. Although the invention has been described in connection with specific preferred embodiments, it should be understood that the invention as claimed should not be unduly limited to such specific embodiments. Indeed, various modifications of the above-described modes for carrying out the invention which are obvious to those skilled in the field of molecular biology or related fields are intended to be within the scope of the following claims.

Lengthy table referenced here
US20030237110A9-20031225-T00001.XML

[0148] Lengthy table referenced here
US20030237110A9-20031225-T00002.XML

[0149] LENGTHY TABLE(S)

The patent application contains a lengthy table(s) section. A copy of the lengthy table(s) is available in electronic form
from the USPTO web site (http://seqdata.uspto.gov/squence.html?DocID=20030237110). An electronic copy of the
lengthy table(s) will also be available from the USPTO upon request and payment of the fee set forth in 37 CFR
1.19(b)(3).

What is claimed is:

1. A purified corn seedling-derived polynucleotide comprising a nucleic acid sequence selected from the Sequence Listing or a complement of the nucleic acid sequence.

2. A composition for the detection of altered expression of corn seedling-derived polynucleotides comprising at least one of the nucleic acid sequences of claim 1.

3. A corn seedling-derived polynucleotide selected from the following nucleic acid sequences of claim 1: SEQ ID NO: 3537 (700162463H1), SEQ ID NO: 1161 (700158211H1), SEQ ID NO: 949 (700157856H1), SEQ ID NO: 3199 (700161822H1), SEQ ID NO: 1744 (700159434H1), SEQ ID NO: 1183 (700158258H1), SEQ ID NO: 377 (700156836H1), SEQ ID NO: 2501 (700160693H1), SEQ ID NO: 2527 (700160740H1), SEQ ID NO: 698 (700157394H1), SEQ ID NO: 2335 (700160435H1), SEQ ID NO: 1988 (700159867H1), SEQ ID NO: 2583 (700160844H1), SEQ ID NO: 585 (700157190H1), SEQ ID NO: 237 (700156608H1), SEQ ID NO: 2719 (700161045H1), SEQ ID NO: 266 (700156661H1), SEQ ID NO: 3021 (700161544H1), SEQ ID NO: 2040 (700159955H1), SEQ ID NO: 2224 (700160253H1), SEQ ID NO: 2761 (700161134H1), SEQ ID NO: 1166 (700158229H1), SEQ ID NO: 1164 (700158222H1), SEQ ID NO: 2479 (700160669H1), SEQ ID NO: 215 (700156563H1), SEQ ID NO: 2448 (700160623H1), SEQ ID NO: 2207 (700160227H1), SEQ ID NO: 2626 (700160906H1), SEQ ID NO: 1339 (700158532H1), SEQ ID NO: 2726 (700161054H1), SEQ ID NO: 336 (700156768H1), SEQ ID NO: 1963 (700159826H1), SEQ ID NO: 2285 (700160357H1), SEQ ID NO: 1969 (700159839H1), SEQ ID NO: 471 (700156989H1), SEQ ID NO: 3118 (700161689H1), SEQ ID NO: 2475 (700160665H1), SEQ ID NO: 2731 (700161064H1), SEQ ID NO: 1695 (700159330H1), SEQ ID NO: 35 (700142454H1), SEQ ID NO: 79 (700142522H1), SEQ ID NO: 2086 (700160030H1), SEQ ID NO: 2000 (700159882H1), SEQ ID NO: 1001 (700157954H1), SEQ ID NO: 1302 (700158460H1), SEQ ID NO: 1205 (700158305H1), SEQ ID NO: 2849 (700161279H1), SEQ ID NO: 2138 (700160112H1), SEQ ID NO: 224 (700156580H1), SEQ ID NO: 385 (700156847H1), SEQ ID NO: 3541 (700162468H1), SEQ ID NO: 3526 (700162448H1), SEQ ID NO: 2137 (700160111H1), SEQ ID NO: 1197 (700158287H1), SEQ ID NO: 2109 (700160067H1), SEQ ID NO: 1902 (700159726H1), SEQ ID NO: 2578 (700160832H1), SEQ ID NO: 1044 (700158022H1), SEQ ID NO: 956 (700157865H1), SEQ ID NO: 149 (700156439H1), SEQ ID NO: 1548 (700159028H1), SEQ ID NO: 3030 (700161557H1), SEQ ID NO: 2128 (700160091H1), SEQ ID NO: 3025 (700161550H1), SEQ ID NO: 195 (700156524H1), SEQ ID NO: 1385 (700158604H1), SEQ ID NO: 1091 (700158090H1), SEQ ID NO: 1517 (700158965H1), SEQ ID NO: 1439 (700158806H1), SEQ ID NO: 2755 (700161125H1), SEQ ID NO: 1449 (700158823H1), SEQ ID NO: 107 (700142566H1), SEQ ID NO: 2916 (700161388H1), SEQ ID NO: 3160 (700161766H1), SEQ ID NO: 3001 (700161515H1), SEQ ID NO: 1940 (700159780H1), SEQ ID NO: 2918 (700161390H1), SEQ ID NO: 426 (700156915H1), SEQ ID NO: 1024 (700157988H1), SEQ ID NO: 2468 (700160654H1), SEQ ID NO: 1886 (700159694H1), SEQ ID NO: 1160 (700158208H1), SEQ ID NO: 411 (700156889H1), SEQ ID NO: 1570 (700159068H1), SEQ ID NO: 3371 (700162137H1), SEQ ID NO: 1942 (700159783H1), SEQ ID NO: 3132 (700161719H1), SEQ ID NO: 138 (700156425H1), SEQ ID NO: 2870 (700161314H1), SEQ ID NO: 2624 (700160904H1), SEQ ID NO: 3518 (700162435H1), SEQ ID NO: 2931 (700161413H1), SEQ ID NO: 1649 (700159219H1), SEQ ID NO: 2477 (700160667H1), SEQ ID NO: 1513 (700158949H1), SEQ ID NO: 3340 (700162062H1), SEQ ID NO: 884 (700157746H1), SEQ ID NO: 1701 (700159340H1), SEQ ID NO: 2480 (700160671H1), SEQ ID NO: 938 (700157837H1), SEQ ID NO: 2834 (700161257H1), SEQ ID NO: 1020 (700157981H1), SEQ ID NO: 2272 (700160340H1), SEQ ID NO: 2055 (700159981H1), SEQ ID NO: 489 (700157022H1), SEQ ID NO: 1294 (700158449H1), SEQ ID NO: 1597 (700159125H1), SEQ ID NO: 1172 (700158240H1), SEQ ID NO: 1243 (700158366H1), SEQ ID NO: 2482 (700160674H1), SEQ ID NO: 2544 (700160768H1), SEQ ID NO: 2862 (700161296H1), SEQ ID NO: 2704 (700161024H1), SEQ ID NO: 2369 (700160492H1), SEQ ID NO: 3242 (700161894H1), SEQ ID NO: 2948 (700161439H1), SEQ ID NO: 1315 (700158484H1), SEQ ID NO: 2700 (700161016H1), SEQ ID NO: 1436 (700158695H1), SEQ ID NO: 1996 (700159877H1), SEQ ID NO: 172 (700156474H1), SEQ ID NO: 1787 (700159515H1), SEQ ID NO: 1929 (700159766H1), SEQ ID NO: 3601 (700162584H1), SEQ ID NO: 1615 (700159167H1), SEQ ID NO: 852 (700157686H1), SEQ ID NO: 2267 (700160335H1), SEQ ID NO: 2887 (700161344H1), SEQ ID NO: 803 (700157615H1), SEQ ID NO: 1878 (700159679H1), SEQ ID NO: 2026 (700159930H1), SEQ ID NO: 1250 (700158376H1), SEQ ID NO: 573 (700157172H1), SEQ ID NO: 105 (700142562H1), SEQ ID NO: 2205 (700160225H1), SEQ ID NO: 2389 (700160522H1), SEQ ID NO: 2876 (700161326H1), SEQ ID NO: 62 (700142492H1), SEQ ID NO: 2469 (700160658H1), SEQ ID NO: 1206 (700158310H1), SEQ ID NO: 666 (700157334H1), SEQ ID NO: 179 (700156486H1), SEQ ID NO: 1378 (700158590H1), SEQ ID NO: 3316 (700162025H1), SEQ ID NO: 578 (700157181H1), SEQ ID NO: 2433 (700160601H1), SEQ ID NO: 865 (700157712H1), SEQ ID NO: 1726 (700159386H1), SEQ ID NO: 3165 (700161772H1), SEQ ID NO: 1409 (700158643H1), SEQ ID NO: 2183 (700160186H1), SEQ ID NO: 2977 (700161476H1), SEQ ID NO: 1985 (700159863H1), SEQ ID NO: 768 (700157547H1), SEQ ID NO: 1499 (700158924H1), SEQ ID NO: 1404 (700158632H1), SEQ ID NO: 374 (700156831H1), SEQ ID NO: 1908 (700159733H1), SEQ ID NO: 1405 (700158636H1), SEQ ID NO: 1543 (700159020H1), SEQ ID NO: 2139 (700160115H1), SEQ ID NO: 1258 (700158387H1), SEQ ID NO: 3344 (700162066H1), SEQ ID NO: 3580 (700162539H1), SEQ ID NO: 1830 (700159602H2), SEQ ID NO: 3531 (700162455H1), SEQ ID NO: 515 (700157065H1), SEQ ID NO: 2723 (700161051H1), SEQ ID NO: 191 (700156519H1), SEQ ID NO: 3259 (700161925H1), SEQ ID NO: 622 (700157251H1), SEQ ID NO: 68 (700142503H1), SEQ ID NO: 32 (700142451H1), SEQ ID NO: 80 (700142523H1), SEQ ID NO: 2225 (700160259H1), SEQ ID NO: 37 (700142458H1), SEQ ID NO: 559 (700157147H1), SEQ ID NO: 581 (700157185H1), SEQ ID NO: 3042 (700161571H1), SEQ ID NO: 2789 (700161181H1), SEQ ID NO: 2692 (700161003H1), SEQ ID NO: 1493 (700158915H1), SEQ ID NO: 2431 (700160595H1), SEQ ID NO: 270 (700156667H1), SEQ ID NO: 2010 (700159905H1), SEQ ID NO: 3401 (700162185H1), SEQ ID NO: 3501 (700162392H1), SEQ ID NO: 307 (700156727H1), SEQ ID NO: 2830 (700161249H1), SEQ ID NO: 3464 (700162321H1), SEQ ID NO: 1034 (700158010H1), SEQ ID NO: 2573 (700160826H1), SEQ ID NO: 1657 (700159236H1), SEQ ID NO: 1646 (700159214H1), SEQ ID NO: 198 (700156531H1), SEQ ID NO: 151 (700156441H1), SEQ ID NO: 3257 (700161923H1), SEQ ID NO: 3553 (700162485H1), SEQ ID NO: 1839 (700159614H2), SEQ ID NO: 3056 (700161591H1), SEQ ID NO: 3320 (700162032H1), SEQ ID NO: 629 (700157262H1), SEQ ID NO: 1889 (700159703H1), SEQ ID NO: 2628 (700160908H1), SEQ ID NO: 1670 (700159272H1), SEQ ID NO: 1274 (700158421H1), SEQ ID NO: 1039 (700158016H1), SEQ ID NO: 1975 (700159850H1), SEQ ID NO: 2951 (700161442H1), SEQ ID NO: 1042 (700158020H1), SEQ ID NO: 1521 (700158980H1), SEQ ID NO: 1119 (700158143H1), SEQ ID NO: 277 (700156677H1), SEQ ID NO: 519 (700157072H1), SEQ ID NO: 1422 (700158672H1), SEQ ID NO: 2315 (700160405H1), SEQ ID NO: 922 (700157810H1), SEQ ID NO: 1175 (700158245H1), SEQ ID NO: 1763 (700159461H1), SEQ ID NO: 701 (700157405H1), SEQ ID NO: 2540 (700160761H1), SEQ ID NO: 1157 (700158204H1), SEQ ID NO: 576 (700157177H1), SEQ ID NO: 356 (700156801H1), SEQ ID NO: 1375 (700158585H1), SEQ ID NO: 3146 (700161738H1), SEQ ID NO: 3150 (700161744H1), SEQ ID NO: 1464 (700158854H1), SEQ ID NO: 2963 (700161457H1), SEQ ID NO: 2213 (700160236H1), SEQ ID NO: 1128 (700158158H1), SEQ ID NO: 3528 (700162450H1), SEQ ID NO: 1730 (700159395H1), SEQ ID NO: 3168 (700161775H1), SEQ ID NO: 918 (700157804H1), SEQ ID NO: 1775 (700159482H1), SEQ ID NO: 2676 (700160978H1), SEQ ID NO: 1567 (700159064H1), SEQ ID NO: 2412 (700160563H1), SEQ ID NO: 1003 (700157957H1), SEQ ID NO: 109 (700142571H1), SEQ ID NO: 1589 (700159110H1), SEQ ID NO: 508 (700157053H1), SEQ ID NO: 354 (700156792H1), SEQ ID NO: 505 (700157045H1), SEQ ID NO: 1307 (700158470H1), SEQ ID NO: 600 (700157219H1), SEQ ID NO: 1121 (700158145H1), SEQ ID NO: 1377 (700158588H1), SEQ ID NO: 2710 (700161034H1), SEQ ID NO: 1843 (700159620H2), SEQ ID NO: 998 (700157949H1), SEQ ID NO: 3564 (700162513H1), SEQ ID NO: 2708 (700161029H1), SEQ ID NO: 796 (700157593H1), SEQ ID NO: 1346 (700158541H1), SEQ ID NO: 2594 (700160860H1), SEQ ID NO: 898 (700157768H1), SEQ ID NO: 3384 (700162163H1), SEQ ID NO: 1552 (700159036H1), SEQ ID NO: 1554 (700159038H1), SEQ ID NO: 1712 (700159356H1), SEQ ID NO: 3094 (700161653H1), SEQ ID NO: 3525 (700162447H1), SEQ ID NO: 1858 (700159650H1), SEQ ID NO: 3428 (700162243H1), SEQ ID NO: 1997 (700159879H1), SEQ ID NO: 2451 (700160628H1), SEQ ID NO: 429 (700156922H1), SEQ ID NO: 1906 (700159731H1), SEQ ID NO: 2660 (700160954H1), SEQ ID NO: 1557 (700159046H1), SEQ ID NO: 2672 (700160972H1), SEQ ID NO: 1066 (700158055H1), SEQ ID NO: 3449 (700162285H1), SEQ ID NO: 1693 (700159327H1), SEQ ID NO: 601 (700157222H1), SEQ ID NO: 3527 (700162449H1), SEQ ID NO: 85 (700142532H1), SEQ ID NO: 2062 (700159989H1), SEQ ID NO: 1862 (700159656H1), SEQ ID NO: 3544 (700162472H1), SEQ ID NO: 279 (700156681H1), SEQ ID NO: 2842 (700161267H1), SEQ ID NO: 1210 (700158315H1), SEQ ID NO: 2456 (700160640H1), SEQ ID NO: 2620 (700160893H1), SEQ ID NO: 724 (700157446H1), SEQ ID NO: 615 (700157240H1), SEQ ID NO: 1694 (700159328H1), SEQ ID NO: 500 (700157039H1), SEQ ID NO: 2781 (700161170H1), SEQ ID NO: 2909 (700161381H1), SEQ ID NO: 436 (700156929H1), SEQ ID NO: 1036 (700158013H1), SEQ ID NO: 1736 (700159416H1), SEQ ID NO: 2569 (700160819H1), SEQ ID NO: 3313 (700162020H1), SEQ ID NO: 1073 (700158065H1), SEQ ID NO: 1990 (700159869H1), SEQ ID NO: 88 (700142539H1), SEQ ID NO: 1704 (700159347H1), SEQ ID NO: 1158 (700158205H1), SEQ ID NO: 3586 (700162548H1), SEQ ID NO: 1901 (700159724H1), SEQ ID NO: 1994 (700159875H1), SEQ ID NO: 3142 (700161734H1), SEQ ID NO: 2907 (700161378H1), SEQ ID NO: 1937 (700159776H1), SEQ ID NO: 2767 (700161143H1), SEQ ID NO: 2032 (700159941H1), SEQ ID NO: 3099 (700161661H1), SEQ ID NO: 2828 (700161245H1), SEQ ID NO: 437 (700156933H1), SEQ ID NO: 2985 (700161490H1), SEQ ID NO: 2499 (700160691H1), SEQ ID NO: 2336 (700160436H1), SEQ ID NO: 1074 (700158066H1), SEQ ID NO: 2073 (700160007H1), SEQ ID NO: 2956 (700161448H1), SEQ ID NO: 1089 (700158086H1), SEQ ID NO: 2195 (700160211H1), SEQ ID NO: 1741 (700159425H1), SEQ ID NO: 607 (700157229H1), SEQ ID NO: 2840 (700161265H1), SEQ ID NO: 2649 (700160942H1), SEQ ID NO: 1221 (700158332H1), SEQ ID NO: 1813 (700159568H1), SEQ ID NO: 1805 (700159552H1), SEQ ID NO: 285 (700156691H1), SEQ ID NO: 294 (700156709H1), SEQ ID NO: 3291 (700161979H1), SEQ ID NO: 2634 (700160921H1), SEQ ID NO: 3039 (700161567H1), SEQ ID NO: 3054 (700161589H1), SEQ ID NO: 453 (700156964H1), SEQ ID NO: 2681 (700160985H1), SEQ ID NO: 937 (700157836H1), SEQ ID NO: 1703 (700159346H1), SEQ ID NO: 2829 (700161247H1), SEQ ID NO: 3120 (700161693H1), SEQ ID NO: 552 (700157137H1), SEQ ID NO: 1431 (700158688H1), SEQ ID NO: 1806 (700159554H1), SEQ ID NO: 1814 (700159570H1), SEQ ID NO: 3308 (700162013H1), SEQ ID NO: 167 (700156463H1), SEQ ID NO: 2059 (700159986H1), SEQ ID NO: 242 (700156618H1), SEQ ID NO: 1256 (700158383H1), SEQ ID NO: 744 (700157489H1), SEQ ID NO: 1895 (700159716H1), SEQ ID NO: 440 (700156938H1), SEQ ID NO: 3217 (700161849H1), SEQ ID NO: 2831 (700161251H1), SEQ ID NO: 1015 (700157975H1), SEQ ID NO: 1366 (700158568H1), SEQ ID NO: 314 (700156740H1), SEQ ID NO: 2188 (700160195H1), SEQ ID NO: 84 (700142528H1), SEQ ID NO: 3069 (700161614H1), SEQ ID NO: 2952 (700161443H1), SEQ ID NO: 53 (700142478H1), SEQ ID NO: 1778 (700159492H1), SEQ ID NO: 1881 (700159685H1), SEQ ID NO: 1907 (700159732H1), SEQ ID NO: 614 (700157239H1), SEQ ID NO: 3395 (700162178H1), SEQ ID NO: 1312 (700158481H1), SEQ ID NO: 243 (700156621H1), SEQ ID NO: 1131 (700158163H1), SEQ ID NO: 678 (700157359H1), SEQ ID NO: 1506 (700158934H1), SEQ ID NO: 2643 (700160932H1), SEQ ID NO: 2593 (700160857H1), SEQ ID NO: 142 (700156430H1), SEQ ID NO: 2371 (700160494H1), SEQ ID NO: 925 (700157817H1), SEQ ID NO: 3041 (700161570H1), SEQ ID NO: 3050 (700161583H1), SEQ ID NO: 3079 (700161637H1), SEQ ID NO: 1245 (700158369H1), SEQ ID NO: 2309 (700160391H1), SEQ ID NO: 2713 (700161037H1), SEQ ID NO: 1289 (700158440H1), SEQ ID NO: 635 (700157268H1), SEQ ID NO: 653 (700157309H1), SEQ ID NO: 244 (700156623H1), SEQ ID NO: 338 (700156771H1), SEQ ID NO: 1406 (700158637H1), SEQ ID NO: 2941 (700161430H1), SEQ ID NO: 2516 (700160725H1), SEQ ID NO: 1945 (700159791H1), SEQ ID NO: 1485 (700158902H1), SEQ ID NO: 3045 (700161576H1), SEQ ID NO: 1271 (700158417H1), SEQ ID NO: 2786 (700161176H1), SEQ ID NO: 156 (700156447H1), SEQ ID NO: 1367 (700158574H1), SEQ ID NO: 3169 (700161776H1), SEQ ID NO: 2076 (700160012H1), SEQ ID NO: 3253 (700161917H1), SEQ ID NO: 950 (700157857H1), SEQ ID NO: 1237 (700158356H1), SEQ ID NO: 2063 (700159990H1), SEQ ID NO: 3574 (700162527H1), SEQ ID NO: 580 (700157183H1), SEQ ID NO: 2034 (700159943H1), SEQ ID NO: 892 (700157757H1), SEQ ID NO: 1096 (700158104H1), SEQ ID NO: 1883 (700159691H1), SEQ ID NO: 2966 (700161460H1), SEQ ID NO: 1632 (700159193H1), SEQ ID NO: 1811 (700159565H1), SEQ ID NO: 1803 (700159549H1), SEQ ID NO: 2390 (700160523H1), SEQ ID NO: 2329 (700160426H1), SEQ ID NO: 2835 (700161259H1), SEQ ID NO: 1428 (700158681H1), SEQ ID NO: 2016 (700159915H1), SEQ ID NO: 3487 (700162367H1), SEQ ID NO: 2699 (700161014H1), SEQ ID NO: 2694 (700161006H1), SEQ ID NO: 163 (700156456H1), SEQ ID NO: 2302 (700160381H1), SEQ ID NO: 23 (700142438H1), SEQ ID NO: 1720 (700159376H1), SEQ ID NO: 1519 (700158975H1), SEQ ID NO: 569 (700157166H1), SEQ ID NO: 3015 (700161536H1), SEQ ID NO: 521 (700157076H1), SEQ ID NO: 736 (700157474H1), SEQ ID NO: 626 (700157256H1), SEQ ID NO: 1846 (700159627H2), SEQ ID NO: 1642 (700159209H1), SEQ ID NO: 2391 (700160526H1), SEQ ID NO: 2410 (700160559H1), SEQ ID NO: 2061 (700159988H1), SEQ ID NO: 413 (700156891H1), SEQ ID NO: 1072 (700158064H1), SEQ ID NO: 1038 (700158015H1), SEQ ID NO: 1854 (700159641H2), SEQ ID NO: 143 (700156431H1), SEQ ID NO: 81 (700142524H1), SEQ ID NO: 3111 (700161679H1), SEQ ID NO: 2806 (700161213H1), SEQ ID NO: 139 (700156426H1), SEQ ID NO: 43 (700142466H1), SEQ ID NO: 185 (700156495H1), SEQ ID NO: 2524 (700160737H1), SEQ ID NO: 64 (700142494H1), SEQ ID NO: 3171 (700161778H1), SEQ ID NO: 2707 (700161028H1), SEQ ID NO: 2033 (700159942H1), SEQ ID NO: 639 (700157276H1), SEQ ID NO: 532 (700157093H1), SEQ ID NO: 3155 (700161756H1), SEQ ID NO: 1338 (700158531H1), SEQ ID NO: 575 (700157176H1), SEQ ID NO: 1177 (700158248H1), SEQ ID NO: 1099 (700158107H1), SEQ ID NO: 1861 (700159654H1), SEQ ID NO: 1832 (700159606H2), SEQ ID NO: 829 (700157650H1), SEQ ID NO: 878 (700157737H1), SEQ ID NO: 1443 (700158812H1), SEQ ID NO: 329 (700156761H1), SEQ ID NO: 3227 (700161866H1), SEQ ID NO: 851 (700157685H1), SEQ ID NO: 2728 (700161056H1), SEQ ID NO: 2854 (700161284H1), SEQ ID NO: 3547 (700162477H1), SEQ ID NO: 2393 (700160529H1), SEQ ID NO: 323 (700156754H1), SEQ ID NO: 1407 (700158638H1), SEQ ID NO: 187 (700156506H1), SEQ ID NO: 441 (700156940H1), SEQ ID NO: 1904 (700159728H1), SEQ ID NO: 1386 (700158605H1), SEQ ID NO: 3323 (700162037H1), SEQ ID NO: 2576 (700160830H1), SEQ ID NO: 1283 (700158434H1), SEQ ID NO: 2048 (700159970H1), SEQ ID NO: 2123 (700160085H1), SEQ ID NO: 2305 (700160385H1), SEQ ID NO: 1191 (700158278H1), SEQ ID NO: 1420 (700158669H1), SEQ ID NO: 335 (700156767H1), SEQ ID NO: 2889 (700161346H1), SEQ ID NO: 798 (700157601H1), SEQ ID NO: 976 (700157911H1), SEQ ID NO: 104 (700142561H1), SEQ ID NO: 1052 (700158034H1), SEQ ID NO: 1347 (700158542H1), SEQ ID NO: 1653 (700159226H1), SEQ ID NO: 958 (700157868H1), SEQ ID NO: 2252 (700160313H1), SEQ ID NO: 2181 (700160184H1), SEQ ID NO: 971 (700157895H1), SEQ ID NO: 2492 (700160684H1), SEQ ID NO: 1043 (700158021H1), SEQ ID NO: 12 (700142422H1), SEQ ID NO: 592 (700157207H1), SEQ ID NO: 3163 (700161770H1), SEQ ID NO: 3331 (700162049H1), SEQ ID NO: 2591 (700160855H1), SEQ ID NO: 2153 (700160140H1), SEQ ID NO: 1917 (700159748H1), SEQ ID NO: 2824 (700161241H1), SEQ ID NO: 3407 (700162206H1), SEQ ID NO: 1453 (700158832H1), SEQ ID NO: 2747 (700161102H1), SEQ ID NO: 2801 (700161206H1), SEQ ID NO: 1558 (700159047H1), SEQ ID NO: 2888 (700161345H1), SEQ ID NO: 1681 (700159307H1), SEQ ID NO: 2330 (700160427H1), SEQ ID NO: 1607 (700159151H1), SEQ ID NO: 1635 (700159196H1), SEQ ID NO: 2115 (700160076H1), SEQ ID NO: 656 (700157319H1), SEQ ID NO: 888 (700157751H1), SEQ ID NO: 711 (700157424H1), SEQ ID NO: 2307 (700160387H1), SEQ ID NO: 145 (700156433H1), SEQ ID NO: 1734 (700159411H1), SEQ ID NO: 342 (700156776H1), SEQ ID NO: 1842 (700159619H2), SEQ ID NO: 1360 (700158558H1), SEQ ID NO: 799 (700157605H1), SEQ ID NO: 1759 (700159454H1), SEQ ID NO: 2486 (700160678H1), SEQ ID NO: 3194 (700161816H1), SEQ ID NO: 1457 (700158839H1), SEQ ID NO: 2666 (700160964H1), SEQ ID NO: 3509 (700162417H1), SEQ ID NO: 2430 (700160593H1), SEQ ID NO: 446 (700156951H1), SEQ ID NO: 3273 (700161948H1), SEQ ID NO: 822 (700157642H1), SEQ ID NO: 1981 (700159857H1), SEQ ID NO: 1146 (700158184H1), SEQ ID NO: 3594 (700162570H1), SEQ ID NO: 2179 (700160180H1), SEQ ID NO: 1195 (700158285H1), SEQ ID NO: 3489 (700162376H1), SEQ ID NO: 2192 (700160204H1), SEQ ID NO: 3023 (700161547H1), SEQ ID NO: 363 (700156813H1), SEQ ID NO: 2498 (700160690H1), SEQ ID NO: 2491 (700160683H1), SEQ ID NO: 1875 (700159673H1), SEQ ID NO: 127 (700156407H1), SEQ ID NO: 1381 (700158596H1), SEQ ID NO: 1630 (700159187H1), SEQ ID NO: 3325 (700162042H1), SEQ ID NO: 3444 (700162277H1), SEQ ID NO: 1705 (700159348H1), SEQ ID NO: 2533 (700160750H1), SEQ ID NO: 1986 (700159864H1), SEQ ID NO: 2348 (700160459H1), SEQ ID NO: 3019 (700161541H1), SEQ ID NO: 2557 (700160795H1), SEQ ID NO: 3212 (700161842H1), SEQ ID NO: 3202 (700161826H1), SEQ ID NO: 1745 (700159435H1), SEQ ID NO: 188 (700156511H1), SEQ ID NO: 964 (700157879H1), SEQ ID NO: 3470 (700162338H1), SEQ ID NO: 3603 (700162591H1), SEQ ID NO: 2500 (700160692H1), SEQ ID NO: 2775 (700161157H1), SEQ ID NO: 2778 (700161166H1), SEQ ID NO: 1740 (700159423H1), SEQ ID NO: 1576 (700159081H1), SEQ ID NO: 3508 (700162414H1), SEQ ID NO: 3484 (700162364H1), SEQ ID NO: 1054 (700158037H1), SEQ ID NO: 4316 (700454828H1), SEQ ID NO: 4594 (700455401H1), SEQ ID NO: 4100 (700454421H1), SEQ ID NO: 5528 (700457192H1), SEQ ID NO: 5760 (700457654H1), SEQ ID NO: 3797 (700453825H1), SEQ ID NO: 5257 (700456691H1), SEQ ID NO: 3788 (700453810H1), SEQ ID NO: 4097 (700454418H1), SEQ ID NO: 5731 (700457589H1), SEQ ID NO: 5009 (700456178H1), SEQ ID NO: 4972 (700456102H1), SEQ ID NO: 5423 (700457018H1), SEQ ID NO: 4519 (700455175H1), SEQ ID NO: 4729 (700455675H1), SEQ ID NO: 5640 (700457388H1), SEQ ID NO: 6092 (700458353H1), SEQ ID NO: 4157 (700454513H1), SEQ ID NO: 6103 (700458378H1), SEQ ID NO: 3821 (700453864H1), SEQ ID NO: 4968 (700456094H1), SEQ ID NO: 4292 (700454771H1), SEQ ID NO: 5425 (700457023H1), SEQ ID NO: 5154 (700456454H1), SEQ ID NO: 5445 (700457055H1), SEQ ID NO: 5146 (700456444H1), SEQ ID NO: 4643 (700455525H1), SEQ ID NO: 5267 (700456715H1), SEQ ID NO: 4380 (700454949H1), SEQ ID NO: 3883 (700453981H1), SEQ ID NO: 5847 (700457846H1), SEQ ID NO: 4889 (700455957H1), SEQ ID NO: 5239 (700456657H1), SEQ ID NO: 5072 (700456315H1), SEQ ID NO: 6018 (700458195H1), SEQ ID NO: 5205 (700456575H1), SEQ ID NO: 5826 (700457804H1), SEQ ID NO: 4475 (700455102H1), SEQ ID NO: 5429 (700457030H1), SEQ ID NO: 5452 (700457062H1), SEQ ID NO: 5453 (700457063H1), SEQ ID NO: 4131 (700454465H1), SEQ ID NO: 5538 (700457213H1), SEQ ID NO: 5540 (700457215H1), SEQ ID NO: 5433 (700457035H1), SEQ ID NO: 3984 (700454206H1), SEQ ID NO: 5369 (700456891H1), SEQ ID NO: 5766 (700457667H1), SEQ ID NO: 5699 (700457519H1), SEQ ID NO: 5698 (700457518H1), SEQ ID NO: 5907 (700457953H1), SEQ ID NO: 5829 (700457808H1), SEQ ID NO: 5872 (700457887H1), SEQ ID NO: 4247 (700454678H1), SEQ ID NO: 5225 (700456633H1), SEQ ID NO: 4823 (700455851H1), SEQ ID NO: 4083 (700454394H1), SEQ ID NO: 4084 (700454395H1), SEQ ID NO: 4030 (700454295H1), SEQ ID NO: 5636 (700457380H1), SEQ ID NO: 4784 (700455780H1), SEQ ID NO: 5925 (700457993H1), SEQ ID NO: 6119 (700458416H1), SEQ ID NO: 6124 (700458424H1), SEQ ID NO: 4463 (700455081H1), SEQ ID NO: 5554 (700457243H1), SEQ ID NO: 5497 (700457136H1), SEQ ID NO: 5602 (700457326H1), SEQ ID NO: 5651 (700457411H1), SEQ ID NO: 4522 (700455178H1), SEQ ID NO: 5647 (700457403H1), SEQ ID NO: 5426 (700457025H1), SEQ ID NO: 5395 (700456958H1), SEQ ID NO: 5422 (700457017H1), SEQ ID NO: 6127 (700458428H1), SEQ ID NO: 6121 (700458420H1), SEQ ID NO: 6128 (700458429H1), SEQ ID NO: 4915 (700456004H1), SEQ ID NO: 5183 (700456520H1), SEQ ID NO: 5179 (700456505H1), SEQ ID NO: 5480 (700457107H1), SEQ ID NO: 6070 (700458311H1), SEQ ID NO: 4263 (700454707H1), SEQ ID NO: 4325 (700454841H1), SEQ ID NO: 5552 (700457241H1), SEQ ID NO: 6241 (700458630H1), SEQ ID NO: 4853 (700455908H1), SEQ ID NO: 5088 (700456339H1), SEQ ID NO: 5082 (700456331H1), SEQ ID NO: 4419 (700455012H1), SEQ ID NO: 5131 (700456416H1), SEQ ID NO: 4417 (700455010H1), SEQ ID NO: 4137 (700454471H1), SEQ ID NO: 4786 (700455782H1), SEQ ID NO: 5221 (700456626H1), SEQ ID NO: 4095 (700454414H1), SEQ ID NO: 4453 (700455062H1), SEQ ID NO: 5253 (700456683H1), SEQ ID NO: 4588 (700455290H1), SEQ ID NO: 4456 (700455068H1), SEQ ID NO: 4428 (700455024H1), SEQ ID NO: 3825 (700453874H1), SEQ ID NO: 4686 (700455610H1), SEQ ID NO: 4711 (700455650H1), SEQ ID NO: 4067 (700454365H1), SEQ ID NO: 4436 (700455038H1), SEQ ID NO: 6010 (700458175H1), SEQ ID NO: 4256 (700454692H1), SEQ ID NO: 5474 (700457092H1), SEQ ID NO: 4656 (700455554H1), SEQ ID NO: 4832 (700455867H1), SEQ ID NO: 5744 (700457627H1), SEQ ID NO: 5226 (700456634H1), SEQ ID NO: 4529 (700455189H1), SEQ ID NO: 5471 (700457085H1), SEQ ID NO: 5451 (700457061H1), SEQ ID NO: 5828 (700457807H1), SEQ ID NO: 5771 (700457674H1), SEQ ID NO: 4957 (700456074H1), SEQ ID NO: 4985 (700456127H1), SEQ ID NO: 4981 (700456114H1), SEQ ID NO: 3971 (700454173H1), SEQ ID NO: 4060 (700454351H1), SEQ ID NO: 4734 (700455681H1), SEQ ID NO: 5136 (700456423H1), SEQ ID NO: 5680 (700457471H1), SEQ ID NO: 5980 (700458123H1), SEQ ID NO: 3940 (700454119H1), SEQ ID NO: 3866 (700453958H1), SEQ ID NO: 5861 (700457867H1), SEQ ID NO: 3836 (700453895H1), SEQ ID NO: 5458 (700457072H1), SEQ ID NO: 4366 (700454923H1), SEQ ID NO: 4211 (700454614H1), SEQ ID NO: 6273 (700458684H1), SEQ ID NO: 5875 (700457891H1), SEQ ID NO: 5140 (700456433H1), SEQ ID NO: 5986 (700458136H1), SEQ ID NO: 6262 (700458668H1), SEQ ID NO: 5247 (700456675H1), SEQ ID NO: 5721 (700457565H1), SEQ ID NO: 4531 (700455195H1), SEQ ID NO: 5577 (700457273H1), SEQ ID NO: 4399 (700454984H1), SEQ ID NO: 6072 (700458313H1), SEQ ID NO: 4442 (700455048H1), SEQ ID NO: 4078 (700454381H1), SEQ ID NO: 4751 (700455713H1), SEQ ID NO: 5790 (700457717H1), SEQ ID NO: 5406 (700456977H1), SEQ ID NO: 4532 (700455196H1), SEQ ID NO: 4012 (700454262H1), SEQ ID NO: 5556 (700457245H1), SEQ ID NO: 5262 (700456707H1), SEQ ID NO: 4900 (700455974H1), SEQ ID NO: 5290 (700456752H1), SEQ ID NO: 3957 (700454145H1), SEQ ID NO: 6291 (700458826H1), SEQ ID NO: 6292 (700458827H1), SEQ ID NO: 4639 (700455517H1), SEQ ID NO: 6137 (700458443H1), SEQ ID NO: 4367 (700454925H1), SEQ ID NO: 4467 (700455085H1), SEQ ID NO: 5473 (700457090H1), SEQ ID NO: 5482 (700457115H1), SEQ ID NO: 4266 (700454717H1), SEQ ID NO: 4272 (700454725H1), SEQ ID NO: 4356 (700454909H1), SEQ ID NO: 4135 (700454469H1), SEQ ID NO: 5259 (700456694H1), SEQ ID NO: 5736 (700457604H1), SEQ ID NO: 5114 (700456381H1), SEQ ID NO: 5656 (700457419H1), SEQ ID NO: 4512 (700455167H1), SEQ ID NO: 4460 (700455077H1), SEQ ID NO: 4553 (700455237H1), SEQ ID NO: 4373 (700454937H1), SEQ ID NO: 4400 (700454985H1), SEQ ID NO: 5379 (700456917H1), SEQ ID NO: 5678 (700457466H1), SEQ ID NO: 5746 (700457629H1), SEQ ID NO: 5152 (700456452H1), SEQ ID NO: 5133 (700456418H1), SEQ ID NO: 4908 (700455987H1), SEQ ID NO: 5650 (700457409H1), SEQ ID NO: 6060 (700458287H1), SEQ ID NO: 6011 (700458178H1), SEQ ID NO: 4271 (700454724H1), SEQ ID NO: 5489 (700457124H1), SEQ ID NO: 5762 (700457658H1), SEQ ID NO: 4068 (700454366H1), SEQ ID NO: 4075 (700454377H1), SEQ ID NO: 3910 (700454049H1), SEQ ID NO: 4394 (700454970H1), SEQ ID NO: 5450 (700457060H1), SEQ ID NO: 5719 (700457561H1), SEQ ID NO: 5763 (700457660H1), SEQ ID NO: 4725 (700455669H1), SEQ ID NO: 4003 (700454241H1), SEQ ID NO: 5487 (700457122H1), SEQ ID NO: 5264 (700456711H1), SEQ ID NO: 5850 (700457850H1), SEQ ID NO: 5501 (700457141H1), SEQ ID NO: 4085 (700454396H1), SEQ ID NO: 4091 (700454409H1), SEQ ID NO: 4404 (700454989H1), SEQ ID NO: 5390 (700456948H1), SEQ ID NO: 5751 (700457638H1), SEQ ID NO: 4914 (700456003H1), SEQ ID NO: 6035 (700458234H1), SEQ ID NO: 6078 (700458322H1), SEQ ID NO: 5893 (700457927H1), SEQ ID NO: 5309 (700456784H1), SEQ ID NO: 4539 (700455212H1), SEQ ID NO: 5551 (700457240H1), SEQ ID NO: 5522 (700457174H1), SEQ ID NO: 5486 (700457121H1), SEQ ID NO: 4478 (700455106H1), SEQ ID NO: 4139 (700454474H1), SEQ ID NO: 5938 (700458026H1), SEQ ID NO: 6329 (700458889H1), SEQ ID NO: 5155 (700456455H1), SEQ ID NO: 5883 (700457911H1), SEQ ID NO: 3873 (700453966H1), SEQ ID NO: 4652 (700455543H1), SEQ ID NO: 4425 (700455021H1), SEQ ID NO: 4406 (700454992H1), SEQ ID NO: 6084 (700458339H1), SEQ ID NO: 3644 (700405359H1), SEQ ID NO: 5258 (700456692H1), SEQ ID NO: 4088 (700454405H1), SEQ ID NO: 3976 (700454186H1), SEQ ID NO: 4054 (700454337H1), SEQ ID NO: 4704 (700455637H1), SEQ ID NO: 3707 (700405462H1), SEQ ID NO: 6165 (700458510H1), SEQ ID NO: 6058 (700458285H1), SEQ ID NO: 4275 (700454729H1), SEQ ID NO: 3755 (700453757H1), SEQ ID NO: 5566 (700457256H1), SEQ ID NO: 4545 (700455226H1), SEQ ID NO: 4144 (700454483H1), SEQ ID NO: 5216 (700456614H1), SEQ ID NO: 4490 (700455127H1), SEQ ID NO: 5278 (700456729H1), SEQ ID NO: 5260 (700456695H1), SEQ ID NO: 5157 (700456458H1), SEQ ID NO: 5483 (700457116H1), SEQ ID NO: 4032 (700454303H1), SEQ ID NO: 5709 (700457540H1), SEQ ID NO: 4125 (700454456H1), SEQ ID NO: 4503 (700455152H1), SEQ ID NO: 4567 (700455262H1), SEQ ID NO: 5442 (700457051H1), SEQ ID NO: 5573 (700457266H1), SEQ ID NO: 5531 (700457202H1), SEQ ID NO: 4031 (700454302H1), SEQ ID NO: 5381 (700456920H1), SEQ ID NO: 6257 (700458655H1), SEQ ID NO: 4322 (700454836H1), SEQ ID NO: 6059 (700458286H1), SEQ ID NO: 5090 (700456344H1), SEQ ID NO: 4920 (700456014H1), SEQ ID NO: 4555 (700455240H1), SEQ ID NO: 6046 (700458257H1), SEQ ID NO: 3985 (700454209H1), SEQ ID NO: 3988 (700454213H1), SEQ ID NO: 5163 (700456469H1), SEQ ID NO: 5791 (700457720H1), SEQ ID NO: 4363 (700454917H1), SEQ ID NO: 4474 (700455101H1), SEQ ID NO: 4337 (700454859H1), SEQ ID NO: 4340 (700454864H1), SEQ ID NO: 3786 (700453808H1), SEQ ID NO: 3686 (700405427H1), SEQ ID NO: 5691 (700457504H1), SEQ ID NO: 4059 (700454350H1), SEQ ID NO: 4038 (700454313H1), SEQ ID NO: 4039 (700454314H1), SEQ ID NO: 5147 (700456445H1), SEQ ID NO: 4376 (700454942H1), SEQ ID NO: 3997 (700454229H1), SEQ ID NO: 3892 (700454004H1), SEQ ID NO: 5747 (700457630H1), SEQ ID NO: 4835 (700455873H1), SEQ ID NO: 3941 (700454121H1), SEQ ID NO: 3990 (700454221H1), SEQ ID NO: 5011 (700456186H1), SEQ ID NO: 5411 (700456986H1), SEQ ID NO: 5904 (700457948H1), SEQ ID NO: 5642 (700457392H1), SEQ ID NO: 4098 (700454419H1), SEQ ID NO: 5803 (700457750H1), SEQ ID NO: 4955 (700456069H1), SEQ ID NO: 5251 (700456679H1), SEQ ID NO: 6017 (700458194H1), SEQ ID NO: 4159 (700454516H1), SEQ ID NO: 4514 (700455169H1), SEQ ID NO: 5271 (700456720H1), SEQ ID NO: 4426 (700455022H1), SEQ ID NO: 4409 (700454996H1), SEQ ID NO: 4559 (700455247H1) SEQ ID NO: 5472 (700457088H1), SEQ ID NO: 3638 (700405352H1), SEQ ID NO: 5283 (700456741H1), SEQ ID NO: 5781 (700457692H1), SEQ ID NO: 5628 (700457367H1), SEQ ID NO: 5076 (700456324H1), SEQ ID NO: 5890 (700457924H1), SEQ ID NO: 4299 (700454785H1), SEQ ID NO: 3740 (700453730H1), SEQ ID NO: 5761 (700457656H1), SEQ ID NO: 5765 (700457663H1), SEQ ID NO: 4699 (700455630H1), SEQ ID NO: 4346 (700454880H1), SEQ ID NO: 6038 (700458240H1), SEQ ID NO: 4564 (700455257H1), SEQ ID NO: 5895 (700457929H1), SEQ ID NO: 5646 (700457402H1), SEQ ID NO: 4666 (700455575H1), SEQ ID NO: 4665 (700455574H1), SEQ ID NO: 3931 (700454106H1), SEQ ID NO: 4089 (700454406H1), SEQ ID NO: 3953 (700454139H1), SEQ ID NO: 3932 (700454107H1), SEQ ID NO: 3901 (700454033H1), SEQ ID NO: 3890 (700453995H1), SEQ ID NO: 5558 (700457247H1), SEQ ID NO: 4863 (700455922H1), SEQ ID NO: 3841 (700453912H1), SEQ ID NO: 6215 (700458576H1), SEQ ID NO: 4495 (700455139H1), SEQ ID NO: 5560 (700457250H1), SEQ ID NO: 3989 (700454219H1), SEQ ID NO: 6114 (700458404H1), SEQ ID NO: 5189 (700456528H1), SEQ ID NO: 5722 (700457568H1), SEQ ID NO: 4563 (700455255H1), SEQ ID NO: 6040 (700458242H1), SEQ ID NO: 5547 (700457230H1), SEQ ID NO: 4104 (700454426H1), SEQ ID NO: 4681 (700455604H1), SEQ ID NO: 6322 (700458877H1), SEQ ID NO: 3608 (700405305H1), SEQ ID NO: 4261 (700454705H1), SEQ ID NO: 5308 (700456783H1), SEQ ID NO: 5178 (700456503H1), SEQ ID NO: 3758 (700453762H1), SEQ ID NO: 3756 (700453759H1), SEQ ID NO: 3708 (700405463H1), SEQ ID NO: 5243 (700456663H1), SEQ ID NO: 6202 (700458557H1), SEQ ID NO: 6196 (700458549H1), SEQ ID NO: 5339 (700456844H1), SEQ ID NO: 4568 (700455263H1), SEQ ID NO: 5608 (700457336H1), SEQ ID NO: 4939 (700456049H1), SEQ ID NO: 5546 (700457225H1), SEQ ID NO: 5416 (700457006H1), SEQ ID NO: 5911 (700457961H1), SEQ ID NO: 5007 (700456175H1), SEQ ID NO: 5564 (700457254H1), SEQ ID NO: 5565 (700457255H1), SEQ ID NO: 5848 (700457848H1), SEQ ID NO: 4670 (700455579H1), SEQ ID NO: 5388 (700456942H1), SEQ ID NO: 4820 (700455846H1), SEQ ID NO: 5806 (700457760H1), SEQ ID NO: 5873 (700457888H1), SEQ ID NO: 5955 (700458063H1), SEQ ID NO: 5161 (700456463H1), SEQ ID NO: 4117 (700454445H1), SEQ ID NO: 5475 (700457093H1), SEQ ID NO: 3835 (700453894H1), SEQ ID NO: 3881 (700453979H1), SEQ ID NO: 5289 (700456751H1), SEQ ID NO: 4687 (700455611H1), SEQ ID NO: 5778 (700457688H1), SEQ ID NO: 5663 (700457434H1), SEQ ID NO: 6140 (700458451H1), SEQ ID NO: 4441 (700455046H1), SEQ ID NO: 4824 (700455853H1), SEQ ID NO: 3827 (700453878H1), SEQ ID NO: 4130 (700454464H1), SEQ ID NO: 4110 (700454435H1), SEQ ID NO: 5793 (700457726H1), SEQ ID NO: 5506 (700457147H1), SEQ ID NO: 6164 (700458509H1), SEQ ID NO: 4048 (700454329H1), SEQ ID NO: 5424 (700457020H1), SEQ ID NO: 5420 (700457012H1), SEQ ID NO: 6151 (700458468H1), SEQ ID NO: 4947 (700456059H1), SEQ ID NO: 4352 (700454902H1), SEQ ID NO: 6111 (700458395H1), SEQ ID NO: 6220 (700458587H1), SEQ ID NO: 6234 (700458616H1), SEQ ID NO: 4560 (700455252H1), SEQ ID NO: 4392 (700454967H1), SEQ ID NO: 4881 (700455944H1), SEQ ID NO: 4929 (700456036H1), SEQ ID NO: 5568 (700457258H1), SEQ ID NO: 5570 (700457260H1), SEQ ID NO: 5545 (700457223H1), SEQ ID NO: 4523 (700455179H1), SEQ ID NO: 5750 (700457637H1), SEQ ID NO: 4873 (700455936H1), SEQ ID NO: 6186 (700458537H1), SEQ ID NO: 6198 (700458552H1), SEQ ID NO: 5414 (700456994H1), SEQ ID NO: 5799 (700457740H1), SEQ ID NO: 5669 (700457445H1), SEQ ID NO: 5754 (700457644H1), SEQ ID NO: 4640 (700455518H1), SEQ ID NO: 3785 (700453807H1), SEQ ID NO: 6245 (700458639H1), SEQ ID NO: 3844 (700453919H1), SEQ ID NO: 3682 (700405418H1), SEQ ID NO: 3627 (700405340H1), SEQ ID NO: 5005 (700456169H1), SEQ ID NO: 4948 (700456061H1), SEQ ID NO: 4355 (700454907H1), SEQ ID NO: 4894 (700455964H1), SEQ ID NO: 5485 (700457120H1), SEQ ID NO: 4586 (700455286H1), SEQ ID NO: 4410 (700455001H1), SEQ ID NO: 4375 (700454941H1), SEQ ID NO: 4251 (700454684H1), SEQ ID NO: 6278 (700458802H1), SEQ ID NO: 4880 (700455943H1), SEQ ID NO: 5092 (700456346H1), SEQ ID NO: 4830 (700455863H1), SEQ ID NO: 4827 (700455858H1), SEQ ID NO: 5219 (700456619H1), SEQ ID NO: 5629 (700457371H1), SEQ ID NO: 5404 (700456971H1), SEQ ID NO: 4525 (700455183H1), SEQ ID NO: 4312 (700454820H1), SEQ ID NO: 3860 (700453944H1), SEQ ID NO: 5676 (700457457H1), SEQ ID NO: 5673 (700457451H1), SEQ ID NO: 5915 (700457969H1), SEQ ID NO: 5108 (700456369H1), SEQ ID NO: 4115 (700454443H1), SEQ ID NO: 4518 (700455174H1), SEQ ID NO: 4359 (700454913H1), SEQ ID NO: 5493 (700457130H1), SEQ ID NO: 4057 (700454344H1), SEQ ID NO: 4975 (700456105H1), SEQ ID NO: 3803 (700453835H1), SEQ ID NO: 3799 (700453827H1), SEQ ID NO: 4953 (700456066H1), SEQ ID NO: 5672 (700457449H1), SEQ ID NO: 4290 (700454767H1), SEQ ID NO: 3742 (700453733H1), SEQ ID NO: 6290 (700458825H1), SEQ ID NO: 6248 (700458643H1).

4. A nucleic acid sequence complementary to at least a fragment of at least one corn seedling-derived polynucleotide of claim 1.

5. A method for detecting a polynucleotide in a biological sample, the method comprising the steps of:
a) providing a biological sample containing nucleic acids,
b) hybridizing a polynucleotide of claim 4 to nucleic acids in the biological sample, thereby forming a hybridization complex; and
c) detecting the hybridization complex, wherein the presence of the hybridization complex correlates with the presence of the polynucleotide in the sample.

6. The method of claim 5 wherein the nucleic acids of the biological sample are amplified prior to hybridization.

7. A method for using oligomers and amplification to recover a regulatory element from a DNA library, the method comprising the steps of:
a) designing oligomers to at least one of the sequences of claim 1;
b) combining the oligomers with a DNA library under appropriate conditions to amplify the sequence of step a);
c) comparing the nucleic acid sequence of step a) with the amplified sequence to identify overlapping areas;
d) identifying additional sequence beyond the overlapping areas, and
e) repeating steps a) through d) until the regulatory element is recovered.

8. A seedling-specific regulatory element which regulates the expression of at least one of the sequences of claim 1.

9. An expression vector containing the regulatory element of claim 8.

10. A plant containing the expression vector of claim 9.

11. An expression vector containing the corn seedling-derived polynucleotide of claim 1.

12. A host cell containing the expression vector of claim 11.

13. A method for producing a corn seedling-derived polypeptide, said method comprising the steps of:
a) culturing the host cells of claim 12 under conditions suitable for the expression of the corn seedling-derived polypeptide; and
b) recovering the corn seedling-derived polypeptide from the cell culture.

14. A purified corn seedling-derived polypeptide (CDP) encoded by at least one of the corn seedling-derived polynucleotides of claim 1.

15. An anti-CDP antibody specifically binding the purified corn seedling-derived polypeptide of claim 14.

16. A method of identifying a test compound which specifically binds to the polypeptide of claim 14, the method comprising the steps of:
a) providing a test compound;
b) combining the polypeptide with the test compound for a sufficient time and under suitable conditions for binding; and
c) detecting binding of the polypeptide to the test compound, thereby identifying the compound which specifically binds the polypeptide.

17. A method of screening a plurality of molecules for specific binding to the polynucleotide of claim 1, the method comprising the steps of:
a) providing the plurality of molecules;
b) combining the polynucleotide with each of the plurality of molecules for a time sufficient to allow binding under suitable conditions; and
c) detecting binding of the polynucleotide to each of the plurality of molecules, thereby identifying the molecules which specifically bind the polynucleotide.

The application's sequence listing, which the Patent Office published only in electronic form, follows.

SEQUENCE LISTING (6332 sequences)

SEQ ID NO: 1 - DNA, 242 bp, Zea mays
  misc_feature: Incyte ID No: 700142401H1
ctcgtagcatctattctttccggtccggcggatgatcgatgttgatatgtgcggtcgtcggcataatatatataatactcgacatcaaacagctagcactagtagggctgcataagtcccgtgggctcattgcgtgttcgatcgatcggatccccatacgatctactagctagctaagctacacgactcgaccgaggaggaggagcgctcaggccgtatagaaacttggagcatgtcgttaa

SEQ ID NO: 2 - DNA, 98 bp, Zea mays
  misc_feature: Incyte ID No: 700142402H1
  unsure 7, 20, 30, 40, 47, 76, 80-81, 90, 96-97: a, t, c, g, or other
gggagancttggctgtctgncctgtctgcnagtacctcgnacttctncctggagcgacaaagcagaagaccatacnaagnngtccaaganggcggnng

SEQ ID NO: 3 - DNA, 237 bp, Zea mays
  misc_feature: Incyte ID No: 700142404H1
agcgacgtgttcgtctgcaggccaagcaatatcctgctctggtctgaggatgttggcatactagagatccatgatccatcctgcaaatctgcatggtagttgcaaaatgtatcgtctcaatttggattagacaggatacaagttatctggcggattgcccagtgtaaacctgaaccttttatgatgtgtggtgtccggtattggcagcaaaaaacaattcgtttactgctgtaagtg

SEQ ID NO: 4 - DNA, 236 bp, Zea mays
  misc_feature: Incyte ID No: 700142406H1
  unsure 172: a, t, c, g, or other
gtggaacatgtggatcatgctcggaagtccgcacaccactgtatagagacgctcctaacatcccagacaaaagcgtatgactaccttccatacttctactcgagggtttttgagtacgagggaagttcgaggaaagtctggtggcagttttatggcgacaatgtcggcgaanagtcgaagtagggaactttgatccaaaggttgcgactttctggatcgactctgatagccggctg

SEQ ID NO: 5 - DNA, 239 bp, Zea mays
  misc_feature: Incyte ID No: 700142410H1
catgcatgttttcttcctgactctctatgtttctttgaggcattcaactacttgtagtatcagtgcatcactgatgtatatatgtgttgatgttcatcatccaagatcaaatacatcctgctaggtcattacttgctaatgtgcatctgagtttgctgttgccaggatggaaatgttttttggcagctttctcagtgaatcagtatcaccgcagaacctttttggacacccagatgtcg

SEQ ID NO: 6 - DNA, 243 bp, Zea mays
  misc_feature: Incyte ID No: 700142412H1
  unsure 82: a, t, c, g, or other
tggcggagctggcacgcgccgctgcacgccctcgggttcgagatggaggagctctccccgtcgcggctcaccggccgcctcnccatcactcccatctgctgccagccgttcaaggtgctgcacggcggcgtgtcggcgctggtggcggaggcgctggcgagcatgggcgcgcacatggcgtcggggtaccgccgcgtcgccggcgtgcagctcagcatcaaccacttccgcagcgccgccctc

SEQ ID NO: 7 - DNA, 106 bp, Zea mays
  misc_feature: Incyte ID No: 700142413H1
gtctgtaggcttttgttattacaagtactcaagttgagtttttgagatgtggctatgacaatgtgatgaagaaccctaaaccatcgtattagagtgaaacttgttt

SEQ ID NO: 8 - DNA, 241 bp, Zea mays
  misc_feature: Incyte ID No: 700142414H1
  unsure 56: a, t, c, g, or other
ggacgaggcaagggaggttggtcctcaggcgctggacttgaagcttccgttcgganagatggatgttctccgggagaacttggagctgatcaagaggcagctgggccttgagcaagtcgaggtgctctccgcgtcggacgaagctgctcgcgctaaggctggtgaacatgcttcgctgctggagaagaacccaccattacccggcgaccccatcgccatcttcctcagcaaacagagctga

SEQ ID NO: 9 - DNA, 231 bp, Zea mays
  misc_feature: Incyte ID No: 700142418H1
atctctgttaggcatctaactgaataaatgatctccattatggactggttatattattttctgtgcgatcggatgggttaaagaaaagacgtgaaatggtattttccagtatggactgtataaatgtaattatattcctatgctggtacgtctgtctaaccttgctattacacttctattatggctttgtgtttacccaaagttccaaacctttcaggtcctgcttcgctt

SEQ ID NO: 10 - DNA, 231 bp, Zea mays
  misc_feature: Incyte ID No: 700142419H1
  unsure 73, 103: a, t, c, g, or other
accgcgtgaggcgtaactgcgccacgtgggacgccgacaagccgctgtcgtggcggcagaagcacggctgganggccttctgcgggcccgccgggcagaaggnccaggccgcctgcggcaagtgcataagggtgaagaaccgtgcgacgggcgcgtccatcgtggcgaggatcgtggaccagtgcagcaacggcggcctggacctggactacgagacggtgttcaagaaga

SEQ ID NO: 11 - DNA, 229 bp, Zea mays
  misc_feature: Incyte ID No: 700142421H1
ctaagttcagaaccatcaatcagtgtgcaaccactacaaccacacgaccagtttctcatatttgcatctgatggactttgggagcagttaaccaaccaagaggcagttgatattgttcgaagtagcccccgcagtggctgtgctaggaggctgataagagcggcactgcaagaggcagccaagaaaagagagatgaggtactcggacctcaagaagattgaccgcggtg

SEQ ID NO: 12 - DNA, 227 bp, Zea mays
  misc_feature: Incyte ID No: 700142422H1
agctgatggcatcggctccagcctacatgccccatccgaccctgatgccggcgcctttcgcccaggcgcccctaactccattccatgcccagggccaagctgcagggcagaagctgatgatgcccttcgtcggctacccagggtacccaatgtggcagttcatgccgccttcagaggtcgacacctcgaaggacagcgaggcgtgccctcctgtcgcatgatcactt

SEQ ID NO: 13 - DNA, 230 bp, Zea mays
  misc_feature: Incyte ID No: 700142424H1
  unsure 71, 193, 205, 224: a, t, c, g, or other
ctcacttgcatttttggcacaccagaacagaagaagaaaaaaaaaacaggcactgagctgagatggcgaanaacttggctgccatgtgcaggtgcagcctcctagtgcttgtactgctctgcttgggctcccagctggcccaatcccaggtcctcttccagggtttcaactgggagtcgtggaagaaagcaangtgggtggtacnactaactccttgggcgggnggaaga

SEQ ID NO: 14 - DNA, 189 bp, Zea mays
  misc_feature: Incyte ID No: 700142427H1
ctgcttgtgatgccatctactgcgacgaagacgactgctacgacctcctaggggttaagcaggacgcgaacgcgtcagacatcaagaaagcgtactacaagctctctctcaaacaccacccggacaagaatcccgatccggagtcgcggaagtcttcgtcaagatcgccaatgcttacgagattctgaa

SEQ ID NO: 15 - DNA, 232 bp, Zea mays
  misc_feature: Incyte ID No: 700142428H1
caaaaaacaacagtcaacaacctgagcttcttgattccaacagatggaagaaagataagaagcactggatccttggaagttcattgtttctaggaagctctatcttgctgaacattgtcctgatctctgttatactcttcggtacttactgtactataaccataaatgaaagcccgtctgtgcagtcatcaaacaatctaggattgcccctgaaagccttcaattacactga

SEQ ID NO: 16 - DNA, 234 bp, Zea mays
  misc_feature: Incyte ID No: 700142429H1
gaggaatccgttcctgcgtggcctagagaacagccgtgcgaaacgaaggaaaaccgatgaagctcgcccgagcgaggcggccgagtcagagcagcaggaggagcactcgctgactctctcccagcactcctcgccgtcgcagtcagaccaagagcagaacggcggcggagtcacaagctctcgccctcgcccaacgcgtcggtctcagcgctgcaaccgttcgctcgcctcaag

SEQ ID NO: 17 - DNA, 233 bp, Zea mays
  misc_feature: Incyte ID No: 700142430H1
  unsure 10, 46, 102, 104, 107, 118, 126, 134, 147-148, 157, 160, 169, 172, 181,191, 219: a, t, c, g, or other
cgctggtgancccgagctcgggcttcccctccatctccaccaacancgcgcggctgggccccaacgcgctgctctccctctccttcccgcccaccttctggncnggncgcgtcgccgngcgcacgngctgcgangccgccgcgtccnnctgctgganggngaccacgcngcncgccaccgncgtgcaggtnaccgtccacgacggcgggaacctggacnaggccaactacagc

SEQ ID NO: 18 - DNA, 234 bp, Zea mays
  misc_feature: Incyte ID No: 700142431H1
gcgaatcgttatttgatagaagcatgtgtgaagtatgatgtgaaatgtccacctccccaaacgacatcgcggttgcttgacaagttggttggccatttcttggaggagacatgtgtgaatccaacatttatcatcaatcatccagagataatgagtccattagcaaagtggcataggtcccgacctggattgactgagaggttcgagttttttgttaacaaacatgaggtgtgc

SEQ ID NO: 19 - DNA, 85 bp, Zea mays
  misc_feature: Incyte ID No: 700142432H1
aatttgtacgcgatgaaggcaacatgaaactaaaattaggggatgaattttgggagagaatacagaccacatagttgtcgttctg

SEQ ID NO: 20 - DNA, 227 bp, Zea mays
  misc_feature: Incyte ID No: 700142433H1
ggtcaagcggtaacagagctatctgcatggctacgtattttgttgtggcgggtctctgccctttgactttgatgtgggttttctactcaacacagatcacttgatctgctgttattttttccgaagtcctgtccttttcagcttctccaacctgtgtcgatacgaggaccatgctacactttggattccgtttccgaaacgttgtgacagcaaaattgatgtagaaa

SEQ ID NO: 21 - DNA, 228 bp, Zea mays
  misc_feature: Incyte ID No: 700142434H1
  unsure 216, 221: a, t, c, g, or other
cacggttcttcgtcaaccgtcatcgctttctccccctcccccgtctcttctccctcgagggaataagcccgccgcgtgaagcttcttcttgcatccgagtgcggaatcacctccaatctgcccctcgggccgccggcgccgatggagaaggtgaagaacatgctcaagccgcggccgacgccgcagcagcagctggcgagtggcagcgccgcctcngaaanaattccg

SEQ ID NO: 22 - DNA, 228 bp, Zea mays
  misc_feature: Incyte ID No: 700142435H1
gttagacaagaactgcagtcatcacatcctgacgatccacatattgtggttctcaaacacaatgtttggcgagtgaagggtctcatccagatctcaagatctattggagatgtatatctaaagaaaccagagtacaacagagaaccacttcacagcaagtttcggcttcgagaaaccttccagaggccgatccttagttctgaacctcaaattactgaacatcgaata

SEQ ID NO: 23 - DNA, 226 bp, Zea mays
  misc_feature: Incyte ID No: 700142438H1
  unsure 144, 167, 186, 192, 195, 198, 200-201, 211, 214, 217, 219, 225: a, t, c, g, or other
gccacctaaatcaaatactgcagatgagaatgcaaataaatatacgcagttcaagcagtttgatactgttcagaatttctctgaccattactacgctaagaattctcatggagagccaaacagagcctggtcaaagagagttcnacatgactggaaacttctggagnaggatctaccagcgtatanttttgntcnggntnncgaagattanatnggncntccttng

SEQ ID NO: 24 - DNA, 226 bp, Zea mays
  misc_feature: Incyte ID No: 700142439H1
taatgactggatacatgtttaggaatgcacagtaccgtctggaactgcaacagagtttggagcagattgctcttcctgaaccaaaagaagaaaaggattacgctcctggaactcagaaaaaggtaaccggggaagttatccgttggaacaaggccactggacctgagaaaattgatgctgtaaaatatatagaattacttgaagcagaaatcgatgagctgagccg

SEQ ID NO: 25 - DNA, 229 bp, Zea mays
  misc_feature: Incyte ID No: 700142442H1
aaggaagaaaacttctggctgcttctagccaacgtggcatctaatgatgtctggttgtcacagaaagtcagcttcatggatgaggccacggccataactgcagcatcaaaagctatacaagagacccaggaagcactaggtgcaagtgcaaaggaaataggaaatgcagttagggaggcagttgacagggtgaagaaaggcagtaggctggtaatgggcaagttccaag

SEQ ID NO: 26 - DNA, 228 bp, Zea mays
  misc_feature: Incyte ID No: 700142443H1
ttaacattagccgagtcttttattgtcttagtagattttgaaaatcattgaaattctttgttagtattaattagtcatgatgtaatgcagtcaacagtgatctgtgttaggggcttagggctggttgcacttttatatttttgaaccgagcttattgtacttaccttttttccaaaaattattattttctctctgctagcttccaactttgcacttttcttgagaaat

SEQ ID NO: 27 - DNA, 231 bp, Zea mays
  misc_feature: Incyte ID No: 700142445H1
  unsure 70, 73, 76: a, t, c, g, or other
gttcttaagagtgttcgtccagaatcatgtctccaaattcaacaagcatccatatgatcttttgagccanaanagnccaatacagattagccgaatggctacaccttctgaatatgtcgttattcgtcgtcagtatcagtgctcttcacaagaggaggttcccaagataagagcccaagatgtagtgtatggaagcatgaagacttgcggaaaatttgaggtcctattatg

SEQ ID NO: 28 - DNA, 216 bp, Zea mays
  misc_feature: Incyte ID No: 700142447H1
caagggcaggcggtggtggcgatggcgtccgctgacgcgcgcttggcggggatcgcctcctccatccgcgtcatccccgacttccccaagccagggatcatgttccaggacatcacgacgttgtgctcgatcccaaggcgttccgtgacaccatgacttttgtcgacggtacaggacaaggatcacgtggttctgtgttgagctagaggtcatttt

SEQ ID NO: 29 - DNA, 103 bp, Zea mays
  misc_feature: Incyte ID No: 700142448H1
atactaagttagcgtccctcggaatgggagtgagtgagttgggaggacttgaaaatgtaagaagaaaaaaaacaaagcatgtgatggatgcttctagatgtgc

SEQ ID NO: 30 - DNA, 248 bp, Zea mays
  misc_feature: Incyte ID No: 700142449H1
gcaaactctggtggtagtgatgatgaaaaggtatgcatgttaaatcaagtgacaggatgtctaggctcagattctcgtggcgtgcaacttccatctgacctgatatcaaactgcatcgcaacggttatttcaatcaagcgccttagcgactcgcgacatccatttggtaacgtagcaggcgtcttggagcatgctttatcaatgctgcgtccaagctgtccacagaactcggagttacacagaaataa

SEQ ID NO: 31 - DNA, 247 bp, Zea mays
  misc_feature: Incyte ID No: 700142450H1
cagatactctttctttggaacgaaggaggcatttggctttgcgccttcctggttattatggcttaggtacagcacctttatgttgttgtatcctactggtatctctagtgaagttggtctgatctacattgccttgccttacatgaaggcatcggagaaatactgtattaggatgcccaacaaatggaacttctcatacgattacttctattcatctgtccttgccctcctgatctatgttccagga

SEQ ID NO: 32 - DNA, 248 bp, Zea mays
  misc_feature: Incyte ID No: 700142451H1
ggagtcgaggagcaggaggctagggtttaaggtgccaggctgagctcgctccccggtcgagatctccttcccctgcggcctcccctcgctccgcttcttcatcgacgacgttgaggatcctgttgctaatgaccctctccagttgcttccgaaaagaacttaccagcccagtaccatcaagcggaaaagaacccatggattccttacacgtaaatcgaccaagggtgggcgcaaggtgattgcccgga

SEQ ID NO: 33 - DNA, 248 bp, Zea mays
  misc_feature: Incyte ID No: 700142452H1
  unsure 165: a, t, c, g, or other
gttctcccatctagcaacaccataatcgcaggagaatcgctgctccaccagactcggtttcctcttgcttcagcgtcaaaatcatggccgcagctggcaagtcgtcgtcggccatggaggagacggttgcggcgacggccgccgcgcgggggcggcgcgggattnaccggcaggccgtcgacaggggcatcgcctacctgctcatggtggccgccctcgtcgccacctacgcgcttcactagattttg

SEQ ID NO: 34 - DNA, 249 bp, Zea mays
  misc_feature: Incyte ID No: 700142453H1
gcagcgccagggcttctccaccatcgccgaagcagccgccgtctcgtgcgttcacctgcctccgccgccgcccgctagcggttccgcctccgccgcagcgttcgcagagacttcgaaggtggcgaggcaagagatgtctatgaagttcaattggcggctgggtttagctgccctgttcaagaatggagaaaaataatatatcaggccttctaccatacgctgacatttttaagcagatgttgaataggg

SEQ ID NO: 35 - DNA, 212 bp, Zea mays
  misc_feature: Incyte ID No: 700142454H1
agcacagctagcgcctgctccccttcgcctgtgatcatgtcttgcagcagcggcaagtgcgactgtggctccagctgctcctgcggcagctcatgcaactgcatgtcccctaacgtggagaccgccgccgccagcagcatcaagaccacggtcctcgccgcgccgaccaccaaggccagcgccggcggcttcgaggcggccaccgagggcgg

SEQ ID NO: 36 - DNA, 247 bp, Zea mays
  misc_feature: Incyte ID No: 700142455H1
  unsure 99, 144, 155-156, 162, 167, 185-186, 208, 215, 220, 233, 242: a, t, c, g, or other
gcctctgcgccgcgctcagcgggactcctcgtccctcggcggcgtcaccgtcgacaagacgcgcgcgctccagctcccccaggcgtgcaagtcaagacnccgccggcgagcaagtgcaactctgctggcggcggcagcgctccnggcgccgcgannccggcnacgcngtcggccggcgtaccatnnaccgcagaaccggcactggatngaaggcnacgcngacggccccgttnctgacgtcnggcgc

SEQ ID NO: 37 - DNA, 248 bp, Zea mays
  misc_feature: Incyte ID No: 700142458H1
ggtgaaattgcctttcttttttgaaccagattaaataggtatgttggaataatcctatttttttcctcttgggaacgcaaccagcacacgttcatcaggagtgtttctgtttggcctggctatctgtttcggtttggatacatacagatagcttaccttcttggttcatcaggagtgcaaagttgcaggatctcaggcggcgctgacgatgacgcagcagccctggagccttccacggccgagcaagg

SEQ ID NO: 38 - DNA, 247 bp, Zea mays
  misc_feature: Incyte ID No: 700142460H1
accttctcaaccttctcatcggtttcctctcccccatggtcgaccccgagctcgacccctccgccgcctccgaggggccagcgctgcccacccgggggtccgacgagttcaagccattcatcaggcgcctccccgagttcaagttctggtatgccatcacaaaagcttttgttatagcttttgtgatgactttcttctcagtgtttgacgttcctgtcttctggcctatatcctctgctatggatgt

SEQ ID NO: 39 - DNA, 249 bp, Zea mays
  misc_feature: Incyte ID No: 700142462H1
  unsure 56, 111-112: a, t, c, g, or other
ggtgtcgctgtcggagcaggagctgatcgactgcgacacggacgagaacgggtganagggcgggctcatggagaacgccttcgagttcatcaagtcccacggcggcatcanncaccgagtccgcgtacccgtaccacgcctccaacggcacctgcgacggcgcgcgggcccggcgcgggcgggtcgtggcgatcgacggccaccaggctgtgccggccggcagcgaggacgcgctggccaaggcggtgg

SEQ ID NO: 40 - DNA, 249 bp, Zea mays
  misc_feature: Incyte ID No: 700142463H1
  unsure 74, 89-90, 99: a, t, c, g, or other
cccaatcagaagagcggcggcgcgggcggacaaggagcaggcggaggaggagttgtgccaagccacaatgggtntctcgcgtgactcgnngcaccagcnccatcggcacagatgatacacacagcaagcgcgagcatatgaggattgccattagagagtagcgacattaaccatgttccccacttctttcccctcccgttcaatctcactggtctttgattgtattatatgtgagcatccatcattctg

SEQ ID NO: 41 - DNA, 110 bp, Zea mays
  misc_feature: Incyte ID No: 700142464H1
  unsure 11, 38, 71, 74-75, 86, 89, 97, 100-101: a, t, c, g, or other
ctcttcttcanctcactaacaccgagctagcagctcgnttctgtcctgcaacaatggccgatcgctcctcntcnnagcagctggtngcngcggtggnggnngcgtgctgc

SEQ ID NO: 42 - DNA, 242 bp, Zea mays
  misc_feature: Incyte ID No: 700142465H1
aggaaagagaagaagacgatccgctagcgtgtgcgtggcgacgagatgtggcggaggcgagtgggcgccctcctccgatctccacgaacttcttcctcggcctcctcggcctgccagagccgccgccaccatcttctccccagcgaggaacctcttgctctcaaccgtcttgccaggctcttcacgtcccaggctggaagtgatggtggcgatacccagaagccctttattgcttttgtctt

SEQ ID NO: 43 - DNA, 119 bp, Zea mays
  misc_feature: Incyte ID No: 700142466H1
atgcccggtgttgactactccagtcggtaatgagatttcctgcaggaacttgtctattgatctttgtaagttaattatttatatgaataaaataagagcaaacatgcttgtgtttgggc

SEQ ID NO: 44 - DNA, 241 bp, Zea mays
  misc_feature: Incyte ID No: 700142469H1
gcatcaagccctctgagcttggtcttgtgctgttatagggcagtctaatcaggacagtcctgagtttacaccttccaggtctcactgtgcaatcccagtggtttcctcattttgtctattgtggtagtggtttctttgatatgattgccatgcccattgatgggagtccaagatgatttgcaaacaaggagactggaattagaaatcctttccttaatttaaggttattattcccattagt

SEQ ID NO: 45 - DNA, 242 bp, Zea mays
  misc_feature: Incyte ID No: 700142470H1
  unsure 86: a, t, c, g, or other
gcgctgaagccgtcggaggtggcgccggccacgtcgctgctgctggccgacctgctgccgcgctacgtggacccctcgtgcgtcanggtcgtgcagggcggcatcgcggagaccaccgcgctgctggagctccagtgggacaagatcttctacacaggtaacagcagagtaggacgcatcgtcatgtcctacgctgccaagcacctgacgcccgtggtcttggagctcggtggcaaatgccc

SEQ ID NO: 46 - DNA, 243 bp, Zea mays
  misc_feature: Incyte ID No: 700142471H1
gcgtcacccgcctagatcttggtaatttgaacttatctggtcatctggtgcctgagcttgggaaactggagcatcttcagtatctggaactttataagaataacattcaaggaacaatcccttctgagcttggcaacttgaagaatctaataagcttcgacttgtacaagaacaacatttcggggacaatacctcctgcccttggaaagttgaagtcccttgtattcttgcgtctcaatggca

SEQ ID NO: 47 - DNA, 169 bp, Zea mays
  misc_feature: Incyte ID No: 700142472H1
  unsure 65: a, t, c, g, or other
cagtgctggctgcgctgaaggtttccatgcataagatgctggtgaagaagcactactcggaaganaggagggagcagaggaaaagaggtaggaacgacaagaagatgaagaactagctgaaaagaggatgaagaactagctcagcatgcggtatcgagttgctataacg

SEQ ID NO: 48 - DNA, 243 bp, Zea mays
  misc_feature: Incyte ID No: 700142473H1
attgagatttttgaggctagcaaagatgataacagagaggcttcaccagaatgctctatttgccttgatggattttacgacggagatgagctgataaggttgcactgtggccacaggttccactcaacatgcttggagccatgggtgaggaaatgttcagactgcccatactgtcggacaaatatacggtcacgatcctgatggcaaacccttagttctgaacaaattataaccaccgcgaag

SEQ ID NO: 49 - DNA, 243 bp, Zea mays
  misc_feature: Incyte ID No: 700142474H1
cacacatcgtagacaacgcaattagctaggaatagcatccatggcgtccggggctgctgcttcctcggccctcttgctcctcgtcgcggccttggtggccaccagtgcgagggcggccacattcaccatcaccaacaactgcggctcgacggtgtggccggcggccaccccggtgggcggcggcacgcagcttgaccccgggcagacgtggaccgtggacgtgccggcggggacccagtccgg

SEQ ID NO: 50 - DNA, 242 bp, Zea mays
  misc_feature: Incyte ID No: 700142475H1
agagattataagttactatgaggttttttgtttgatgctactgcttgttaccttaatgttagcatgcttttagatgtatagttagtttggtgttggttgttaggttcattgtgtactatgcagattaaattttgatttttattccttgctatccatttcagtgctgtctaggcgtgtggctgttagctaagggccattgtgttttgtgctcagatggaatcctaccaatatttcgctacaaa

SEQ ID NO: 51 - DNA, 127 bp, Zea mays
  misc_feature: Incyte ID No: 700142476H1
  unsure 12, 14, 69, 71, 76-77, 80, 93, 96: a, t, c, g, or other
agacggcgcgcngngtcgccgagctcaccgtgccgccgttcctggaccgcagcgtcctgaaggcgcgcnanccgtnngtncccaccttcctcnacnacgagttcgccgagatccccgacgtctccga

SEQ ID NO: 52 - DNA, 242 bp, Zea mays
  misc_feature: Incyte ID No: 700142477H1
attggctacttggttgcacgtcggaggcggcgtgggttcaaggttggtttcattgacaggtggtatcatcaaatctttttctttcctttatttcagcagtatcatgtgtcaatctgtttgcttgactttaatctatatcaatttctattatagtattatttatacagtgttttttgtccatataaattgcagctgcagtcagcccatgtaattctgctattcgaaaacccccattctagcag

SEQ ID NO: 53 - DNA, 243 bp, Zea mays
  misc_feature: Incyte ID No: 700142478H1
cgctcgcgctgaagcctgatctccaccgggttcgcagcaggggcgcaggacctcgatcacgaggaggcaggggagcagcatccacaaccacaagccatggcggggagggccaacatcccactaacaactccgccctcatcgcaatcatcgccgacgaggacaccgtcactggcttcttgatggccggcgttggcaatgttgatctgcgcaagaaaaccaactacctcctcgtcgacaacaaga

SEQ ID NO: 54 - DNA, 245 bp, Zea mays
  misc_feature: Incyte ID No: 700142480H1
  unsure 97, 234, 244: a, t, c, g, or other
tcctgtcgtgggatcccagccaccgccgctagaagaagagctcggcgattcccaggtcccgcgagaatatgccgaagcagatccatgagattaaggncttcctcctcaccgcgaggaggaaggatgcccgctcagtgaagatcaagaggagtaaggatgttgtcaagttcaaggtgcgctgctccaagtacttgtacacgctctggtcttcgatgctgagaaggcaaacaagtngaagcaatcnc

SEQ ID NO: 55 - DNA, 236 bp, Zea mays
  misc_feature: Incyte ID No: 700142481H1
  unsure 58, 76, 98, 105, 118, 121, 124, 139, 193, 198, 201: a, t, c, g, or other
ctagtgtgtttttagggtgagcccgtccaagatgcccatgcgtccccgcgcccctcgncagctgatgtcgtactangctaggggattgaagaagcacntgaagangctcaatgcgccnaancantggatgctcgacaancttggcggagcttttttcatgctctgcaaggtgaggtctgttcatttggccagnaaggnatnccctacctgaacacctacgatgatcgcaccatccg

SEQ ID NO: 56 - DNA, 234 bp, Zea mays
  misc_feature: Incyte ID No: 700142482H1
  unsure 9, 14, 52, 62-63, 66, 70, 74, 76, 82, 87, 156, 159, 232: a, t, c, g, or other
tgcgtatangtcgntacaggcgtacagttcttaggaatgctgcttgtcaccntgctgtttgnnatnctcngccncntttcanctgcnaatcgcggaaggctcatgacagcaatgctcctcctctgggtcttcatggggctgtttgcagggtacgcntcntcgcggctttacaggatgttcaagggctcgcatggaagaatgtcaccatcaagaccgcgctgatgttccctgnca

SEQ ID NO: 57 - DNA, 235 bp, Zea mays
  misc_feature: Incyte ID No: 700142485H1
  unsure 43, 161-162, 206, 209, 215, 233: a, t, c, g, or other
gacatattgatatgcaattggtttggtatttgggctggaatgnaaaccgtgcagtacttcgatgggaggacatacgaatgggttggtttgagccgccaacccaacattatcagtaaggtaaaaaggatgctgggacagttcacaccagcacagtgggacanngacgagtggcaacctacgctgggtccttggagattcatccaggngcngagccnttgtgttgttttcatggntg

SEQ ID NO: 58 - DNA, 233 bp, Zea mays
  misc_feature: Incyte ID No: 700142487H1
gtgtagttacaggtcttcgttgcctctgagtggatgctgaacagtgaatgaaccaagacgaaacgatgctatgctagatgttaccttgacgtctgtggttgccttggaactctggaaccgtgatggctggtggacggtggttgagttatgcttgttcgtttcagtttcagacatgctgtgcagatgattcgtaaactgactcgtctttcatcatttggaagggttatcgtatc

SEQ ID NO: 59 - DNA, 78 bp, Zea mays
  misc_feature: Incyte ID No: 700142488H1
  unsure 42, 44, 55-56, 63-64, 67, 72, 75: a, t, c, g, or other
gtcggcgacgacgtgctgttcggcgacaacgacccggcctcngncaagcccaagnncggcaannacngggtnaangac

SEQ ID NO: 60 - DNA, 73 bp, Zea mays
  misc_feature: Incyte ID No: 700142489H1
ctatatgcaagtgttgtacggagtactaaactcatacgtggtaaaagatgaataaagacttaaacatttcttt

SEQ ID NO: 61 - DNA, 233 bp, Zea mays
  misc_feature: Incyte ID No: 700142491H1
  unsure 101, 185, 214, 219: a, t, c, g, or other
atcacagacgcttaatgtaacgtgtggctaaacagaatcattaatggctgcattgtggtccaactaatattgttgctactttattgtatatgtatatatcnatgttgtggcttaatatgtctgtaattatactcgaaaataccattatctgttcagtgtgagttatatatataacttttgctacnttgccatataattagacattgtacatggnatcgntaggacatatttcg

SEQ ID NO: 62 - DNA, 237 bp, Zea mays
  misc_feature: Incyte ID No: 700142492H1
  unsure 99-121, 128, 181, 226: a, t, c, g, or other
caaattaagtagtggagtgtcagaacttgggaggcacaaattaagtacaaagcagtctaattaatgacgggcccgatggagattccggtgatcgatctnnnnnnnnnnnnnnnnnnnnnnnaggagangtcgcggaccttggcggagctccacgacgcctgcaaggactggggcttcttcngggtggagaaccacggcgtggacgcgccgctgatggacgaggtcnagcgcttcgtc

SEQ ID NO: 63 - DNA, 236 bp, Zea mays
  misc_feature: Incyte ID No: 700142493H1
  unsure 20, 86, 206, 212: a, t, c, g, or other
ctatcagctgcctggaagangtcgtcagggaagcgaaaggccggctaccggtgttcctcgacggcggcgtccgccgtggcacggangtcttcaaggccctggcgttgggagcttcaggagtgttcatcggccggcccgtgctgttctcgctggcggtggacggcgaggccggcgtgcggaaggtgctgcagatgctgaaggacganctgganctcaccatggcgctcagcggctgc

SEQ ID NO: 64 - DNA, 237 bp, Zea mays
  misc_feature: Incyte ID No: 700142494H1
aactcttcgtctttctttcttcttcttctcttctccactgcacatcctcctttcttcttctcctcgtcgatcggcaagctaaggaggcaccattgcttgtcgtctgatccccgccgggcgcgtgtcgctgcacaagatgacgacggcaacagccgttggcagcgtcgccgaccgcatcatgccgcacctcctcaacatatatggatcgtctgcgacggcacgggacttcgagattta

SEQ ID NO: 65 - DNA, 238 bp, Zea mays
  misc_feature: Incyte ID No: 700142495H1
  unsure 227: a, t, c, g, or other
cggaaagacccgaagagaatgtgttccttcatgagcagtgtaaaaactttgaatctcctctaacatactagtgctttattggtcgtagtttcttggtgcagtatgtggaaactgaataaatggcagtcctaataaaaataaaaataaaaataaaatgaccatcataggtaagctgtccagaacagaggcattgtcgatctttggcatcaaccagtaaaattcatgcnatgagcagcta

SEQ ID NO: 66 - DNA, 241 bp, Zea mays
  misc_feature: Incyte ID No: 700142496H1
gcatgatttgctcatggtggaagtatgggaccatgatacatttggaaaggattacatagggaggtgcatcttgacactgacgagagttatactcgaaggtgaattccaagatacctttgtcttgcaaggtgccaaatcgggaaaactaaacttgcatttcaagtggacgccacagccaatctatcgtgatcgtgacagggatcagtgagacctgtaaacggaaaaggccgataaacactta

SEQ ID NO: 67 - DNA, 203 bp, Zea mays
  misc_feature: Incyte ID No: 700142502H1
  unsure 92-93, 116: a, t, c, g, or other
ccgacttcatcaaggtcagcgacgacgaggtggccttcctcacgcgcggggacgccaacgacgagaagaacgtgctgtccctgtggtttgannggctcaagctgctcgtcgtcacngacggggacaagggatgcaggtacttcaccaaggacttcaagggcagcgtgcccggcttcaaggtcgacaccgtcgacaccaccggc

SEQ ID NO: 68 - DNA, 248 bp, Zea mays
  misc_feature: Incyte ID No: 700142503H1
  unsure 57: a, t, c, g, or other
ggagtcgaggagcaggaggctagggtttaaggtgccaggctgagctcgctccccgangagatctccttcccctgcggcctcccctcgctccgcttcttcatcgacgacgttgaggatcctgttgctaatgaccctctccagttgcttccgaaaagaacttaccagcccagtaccatcaagcggaaaagaacccatggattccttacacgtaaatcgaccaagggtgggcgcaaggtgattgcccggag

SEQ ID NO: 69 - DNA, 247 bp, Zea mays
  misc_feature: Incyte ID No: 700142505H1
accattttctacaaccaggttaatgtcgtgaaaggcttgaagatatatgaagatgcgtttacgacatcagagatcatgaaagttgcagatttcatcaacgaaattcgtcaggctggcagaaatggagaactttcaggtgagactttcatattcttcaacaagcagatcaaaggaaacaagagggagatcatacagcttggtgtaccgttatttcaacctaccacagaggatgctaattgtcacacag

SEQ ID NO: 70 - DNA, 246 bp, Zea mays
  misc_feature: Incyte ID No: 700142508H1
gagcactagagcccattaagacatcatatgcagtgaacatacactcagcctcttgtttaagcagtacgtatactatttcagttgatgaacaaatattgcaggcttcttgttatttgtaatcagccactgattctggcaggatgcacggcttctgtttctctgtgcggtgcatatctaaaagtgcacgtagtcattttcgtctgtggtttgatttgaaaccaaagcagaggctggcctcaatgttag

SEQ ID NO: 71 - DNA, 247 bp, Zea mays
  misc_feature: Incyte ID No: 700142511H1
ggttgctacacgtatatattctgaagaagagatcgagatgaccagcgtgtggaagaccaaggttctgcctggcctcaacaagatctttgacaaggatggcaagaaggctgcagctgcaggcttcttgaagtccttcaacaaggaggagattgacaaggagattgaggacaagaagacagagctggagcccaaggtcgtggaggcctacgaagcatctcctcctgaggtcaaggctctgttcaaggat

SEQ ID NO: 72 - DNA, 246 bp, Zea mays
  misc_feature: Incyte ID No: 700142513H1
  unsure 137-160: a, t, c, g, or other
gttcctgactcctcgttcgttctgcgtttcgcgactgagatagccaaccctgcgactgcgtgcgtgcgggcgagcgagcaggcagaatggagcgccacgcccagaagcaggcgccgctagtcctcgcgctgtcctgnnnnnnnnnnnnnnnnnnnnnnnncgtctccgccgtccccactccaagaagcctgcgcctggggggccagcagcagcacccgccggctctgaagtcattcttctcaggag

SEQ ID NO: 73 - DNA, 247 bp, Zea mays
  misc_feature: Incyte ID No: 700142514H1
  unsure 227: a, t, c, g, or other
tatcgatccgcagaaattgcttcagttctttgcgaggtttggtgagatcgaggaaggcccgcttggtcttgacaaggtcactgggaaacccaagggatttgctctttttgtctacaagaccattgaaagtgccaagaaggctcttgaggagccacataagcattttgagggagtgatgctgcactgccagaaggcgattgatggaccaaagccgaacaaattaggangagctggaggtttttcggtg

SEQ ID NO: 74 - DNA, 248 bp, Zea mays
  misc_feature: Incyte ID No: 700142515H1
gtctgtggcagagaaaggagattctgtggaaggtggagaaaaggtagttagtaaggaggttaagccagcaaaagatgaggtggtcgacaaggacctgttgcaggcctttaggtactttgacataaatagagcaggatatctcaagatggatgatttaaaatgtattcttcacaacttgggcaagtttttatcaagcagggacgtgaaggacttggttcaagttgctcttgttgagagcaatctgcaag

SEQ ID NO: 75 - DNA, 204 bp, Zea mays
  misc_feature: Incyte ID No: 700142516H1
accgctgttaggttctaccaggagaccttcggcgtccctccggccacgcgagctcgccgaaatggtcgcccacaggttccatcagtaccaggtggtgggtcgcgcgctgccgaccccaaccgatgagcaccccaagatctaccgcatgaagctctgggccaccaacgaggttcgcgccaagtccaagttctggtattcctgaga

SEQ ID NO: 76 - DNA, 242 bp, Zea mays
  misc_feature: Incyte ID No: 700142519H1
aaaccaaaaaatatcagggtaagcttgcagcacggttgaaggccaaatatttttccaacaagacttttgaagaaggatatgtgtttgaagaaattgttatagaatcaaagaccgtccggctaagcaggtggccgtttacaaggttgtttgcagatccagcaagactttgccgagaaaagagctctaatgagaagggcatttctccacctctggctggtgaagccatgtcagatgactaagca

SEQ ID NO: 77 - DNA, 243 bp, Zea mays
  misc_feature: Incyte ID No: 700142520H1
  unsure 9: a, t, c, g, or other
acgtgagcnagcccaccaccttcgagaacatcagccggtggctcaaggagctacgcgaccacgccgactccaacaccaggatcatgctcgtcggcaacaagaccgacctgaggcacctccgggccgtcgccaccgacgacgctcggagcttcgctgaggcagaaggcctgtcctacatcgagacgtccgcgctggaggccaccaacgtggaggaggcgttccagctcatcctgggcgacattt

SEQ ID NO: 78 - DNA, 240 bp, Zea mays
  misc_feature: Incyte ID No: 700142521H1
  unsure 33, 125, 212: a, t, c, g, or other
caaggagaaattgcaaacctgtcactagcgaanatacttcgtcgagcacactcttgcaattaatccaccgagttcggtttagtagcatagcatcgacaataaatgtcgctcgtgagtcggcgcanagcaacgtgttcgaccccttctccctcgacctctgggaccccttcgacatgttccgctccatcgtcccgtcggcggcctcctccggnggcggttccgagaccgccgccttcgcca

SEQ ID NO: 79 - DNA, 195 bp, Zea mays
  misc_feature: Incyte ID No: 700142522H1
agcacagctagcgcctgctccccttcgcctgtgatcatgtcttgcagcagcggcaagtgcgactgtggctccagctgctcctgcggcagctcatgcaactgcatgtcccctaacgtggagaccgccgccgccagcagcatcaagaccacggtcctcgccgcgccgaccaccaaggccagcgccggcggcttcgag

SEQ ID NO: 80 - DNA, 195 bp, Zea mays
  misc_feature: Incyte ID No: 700142523H1
gttggaataatcctatttttttcctcttgggaacgcaaccagcacacgttcatcaggagtgtttctgtttggcctggctatctgtttcggtttggatacatacagatagcttaccttcttggttcatcaggagtgcaaagttgcaggatctcaggcggcgctgacgatgacgcagcagccctggagccttccacg

SEQ ID NO: 81 - DNA, 241 bp, Zea mays
  misc_feature: Incyte ID No: 700142524H1
cacaattcctctcctggaagcagcgcaaggatgcagaggtagccgcaaggaaagctgaagcagctgagaagcgagctgatgatatcgcttcgggagcggcgcagatgaacggccgcgagctgttccaacatgagccctgggtgttcgacaacaacatttactgagatcgtgtcgggctactgttcctgcattagtccaagctccagcggtggtttcattttgtactgctatatcagctttg

SEQ ID NO: 82 - DNA, 172 bp, Zea mays
  misc_feature: Incyte ID No: 700142525H1
  unsure 19: a, t, c, g, or other
gcccttctccgcgaaatanccgtcgccgcactgccgcagctccggctatgtcaatcttcgagtacaatgggtccgccgtggtggcgatggtggggaagaactgcttcgcgttgccagcgaccggcggctcggcgtgcagcttcagaccatcgcgacagacttccagagggtg

SEQ ID NO: 83 - DNA, 241 bp, Zea mays
  misc_feature: Incyte ID No: 700142527H1
tgagttcttccgtgatgcccaagagaaggtcctcccgtatgctgactacatcttcggcaacgaaactgaggcaaagatctttgccaaagtcagaggatgggagactgagaatattgaggagattgctttgaagatctctcaacttcctttggcttcaggcaagcaaaagaggattgctgtgattactcaaggtgctgatccagtggttgttgctgaggatgggaagtgaaaacgttcctgt

SEQ ID NO: 84 - DNA, 119 bp, Zea mays
  misc_feature: Incyte ID No: 700142528H1
caagctttgtgctgatggacatcgacgggctccgtgtggtggtgtacgtctacgagctgattgacggcgaggtgaaggtggacaaaatcgacttcaagaagactgcgacgatgcacggc

SEQ ID NO: 85 - DNA, 244 bp, Zea mays
  misc_feature: Incyte ID No: 700142532H1
atcttttacagtacaggactattaagtttcctgatttcgtggatgcaaaatttggtgaggaagcttcagctttgcttccaggttgctgtgttgtagttttacgtgaagggcatcaggatataggatccatagctacagatccctcggccattgccattgtttgctggaaaggaaagaccaatttgtgcgtcatggtttctccgctagatggtaaagaattgcttgagaggattctttgcgccat

SEQ ID NO: 86 - DNA, 236 bp, Zea mays
  misc_feature: Incyte ID No: 700142537H1
aaggattcgaaaagcagttcaacttgccagggagtttcatttcaactacactactccagacagaagcagacaggagttgctcctgaatagaacccctcttccaacggagcattggcctttcttaagaatcaacggcaaggacgtgcacgtttccaccccaaggacaccgagggctccaaaacacgctgctcgcctttcacgcctcaagctggtcgacgtgaagccaatcacggctg

SEQ ID NO: 87 - DNA, 235 bp, Zea mays
  misc_feature: Incyte ID No: 700142538H1
ctttgagttgaataatttattgcaggaatccataagaaactcagctgacaaaatgctcctgacagcaccagattctttggttgtttcattagcaaaatatgacacacacaatggtgaggaaggtctatcaacttccaaaaaaggtcgtgcacttggttttggcattgatgcccttgacatgctgaattttacatataaggtgtcttggcctcttgatctaattattaatacagag

SEQ ID NO: 88 - DNA, 235 bp, Zea mays
  misc_feature: Incyte ID No: 700142539H1
tacaacttcgacctagctaactctgtctctagcaaccgtgcatacatgtctgagatctcttttgcggtatcaggagaagggccatcaatacagccgtacaggagattggattctgcatttttttattccacctcacgaaataagtagtaaaatctttttactgatacgggaaataacggatcatgccatgctccggagtcgatagtttttttcaccagacggggcagtgcttggc

SEQ ID NO: 89 - DNA, 235 bp, Zea mays
  misc_feature: Incyte ID No: 700142540H1
gcacaagacggaaggcctgatggaggcggccgtcatcggagtcggcgcgcccacgctgaaccagtcggtgatgaccacgttcccgctcgacaccgacttcggcttcggccaggctactctggcaaccacggtctctgactatggcaggctttgctcggctttcctttcggtcggagcgcggccgggagggacggctcctggctcgtcaccgcctacatatggccgcagctggcgg

SEQ ID NO: 90 - DNA, 236 bp, Zea mays
  misc_feature: Incyte ID No: 700142541H1
aattagagaaggttatcaagagcgaaacttctggaaactttgaatttgcacttttgactatcctcagatgtgcggaaaacccagcaaagtattttgctaagctcttacgaaaggccatgaaaggtttaggcactgatgacatgacacttataagggtggtggtgacgaggaccgagattgacatgcaatatatcaaggcagagtacttgaagaagtacaagaagccattagctgag

SEQ ID NO: 91 - DNA, 112 bp, Zea mays
  misc_feature: Incyte ID No: 700142545H1
atgacttggaggccggcgaggtggagtcgtcgaacggctggccgatgtatttctcggcgtacaaggtggccaaggcggccatgaacgcgtactcgaggatcctggcgaggcg

SEQ ID NO: 92 - DNA, 237 bp, Zea mays
  misc_feature: Incyte ID No: 700142546H1
aagtggcaagcttcgaggctatttggagcttgaccccttatcagtaccagaggaatttctcgactgattccatctgagataaactttatcaaccacaaatctggaaccttcttgtgatgaagtttctgtaactgaggctcagttaatgttaaggtcgacaggtcaacattgttcaaatgacactgacataagatgtctggatttcagcattcatagcactaacgttcttaaggctct

SEQ ID NO: 93 - DNA, 193 bp, Zea mays
  misc_feature: Incyte ID No: 700142547H1
gtaggctggtagtgttcgaattagttccccattgctttgtgttgccgctagttggcattaagtccgtgtggactggtattattcactggatttgagaagcatgtcagtggttgctctagcgttttattgagttttgaagtcatctccctcatttcggtttcaatcatttagcagattgtgcatatggttgtgt

SEQ ID NO: 94 - DNA, 241 bp, Zea mays
  misc_feature: Incyte ID No: 700142549H1
acaaattttcagcccccagacatgttggacaagcaaataggactcctcccaggcgttgtgttcgactccacacctcctggggtggagttcggagatgtcagctcagacgtccccgcaagctcaactttcaggaagggcagtgtcgtgaacgctacattctactcggcgtgcccgaggaatgaccttctcacggacggcacgttcgcgctcgttgagaagctggacggcagcaacagctggg

SEQ ID NO: 95 - DNA, 236 bp, Zea mays
  misc_feature: Incyte ID No: 700142550H1
  unsure 164: a, t, c, g, or other
gcgacgacggcacgccctactggatcgtcaagaactcgtggggcccttcctggggagagggcggctacatccggatgcagcgcggcaccggcaacggcggcctctgcggcatcgccatggaggcgtcctttcccatcaagacctcgcccaacccgtcgcgcaancccgccgcgcgctcatcaccagggacgcctcttcccagtgacaggctgattcatctcggcgtcgaactcgta

SEQ ID NO: 96 - DNA, 158 bp, Zea mays
  misc_feature: Incyte ID No: 700142551H1
gtcatctgttcttcattcccagccgaagtccactgttggaacacctgcttatattgcacctgaagttttgttgaaaaaagaatatgatggcaaggtacttgtgctatcactttttttatcttgagaaatgtgtcttgagagttgtgcatacctctgca

SEQ ID NO: 97 - DNA, 235 bp, Zea mays
  misc_feature: Incyte ID No: 700142552H1
gcgacgcgtcgttgctgctggacgacacgcccagcttccagggcgagaagatggccaagcctaacaacggctccgtcagaggcttcgaggtcatcgacgccatcaagtccgccgtcgacaaggcctgccccggggtcgtctcctgcgccgacatcctcgccatcgccgccagggacagcgttgtcaccctcggaggtccgaactgggacgtcaagcttggccggagggactccag

SEQ ID NO: 98 - DNA, 94 bp, Zea mays
  misc_feature: Incyte ID No: 700142554H1
  unsure 3, 10, 34, 41, 49, 88, 91: a, t, c, g, or other
gcnctccgangaggtggactgggagtccacctanttcatcnagcaccancccaagaccaacgtcgccgacttcccagagattcacgcngcngac

SEQ ID NO: 99 - DNA, 233 bp, Zea mays
  misc_feature: Incyte ID No: 700142555H1
catagtgcgagtgagctatgcagcacatgtcatgcttgtctttcccattgtcttctttgccctccggctcaacttggatgggttgctcttccccacgtcaaggcacatctctcgtgacaacaagagattcgccatcatcaccgtctctctcctcgcagtaatttatcttgctgccattctcataccaagcatctgggacgcgttccagtttactggtgccacagctgctgtcc

SEQ ID NO: 100 - DNA, 158 bp, Zea mays
  misc_feature: Incyte ID No: 700142557H1
ctagcagcaacactgcagctttattgagagagcgagatttttactgctgtttcctttcttaaagaaaaaaaattcttggttagtgtatctgaacttatgtttcctttggaatatttgcttttcagtatgatgtgcccaacttaagtacttttattagc

SEQ ID NO: 101 - DNA, 234 bp, Zea mays
  misc_feature: Incyte ID No: 700142558H1
tccagacccgaccgcagcagcccggggcaacaagcgaaccgacggcggcgatggggatcggtgagcacttcgagggcgtcaagcagcactgggcgagcaacttcgccttcctcgactacttcaagaaggtctacggccgcgccgagcccctccccaagtggtccgacgccgacgtcgacgagttcatcgcatccgacccggtctacgggccccagctcaaggccctgcgggagt

SEQ ID NO: 102 - DNA, 233 bp, Zea mays
  misc_feature: Incyte ID No: 700142559H1
ggagcacgccactgccggagcctctgcgcctgcgcctgcgcacgcgcgcgcggggcgtccggcgtgaggacggtggcggcgtgcgcacggagtcggaggagcaggagcagagtcagactcagacggcaccgcggacgttctacgaactgctcgggatctcgtcgcaggggagccccgatgatgtccgggcggcctacaggaggatggctctgatgtaccacccggacgtgtcc

SEQ ID NO: 103 - DNA, 232 bp, Zea mays
  misc_feature: Incyte ID No: 700142560H1
aacacttccaaagggaaaaggaaagccagtgagaacagaagtttatatttaaacgaaaaggctctcaagaaagcacgtggcaatagtaatttgggtggaagttcaagatctaaatcatatgcctctgatctggaacctcatgctggattcatttcgcctgcgattcgagataatggcagtgatgcatataatcgacagagaactgcacggtatgatatccatcctatagatg

SEQ ID NO: 104 - DNA, 231 bp, Zea mays
  misc_feature: Incyte ID No: 700142561H1
cttctttcctgaatgaagtcttcataaagttggatggtgtttggggtctgcttgggactgctgctttcgcattcttctgcttctatcttcttattgcagtgattgctggggagatgatgcttggattgaagctagtttttatcacaattcacccgatgaaatggggaggcactttaatgaactccttcctgtttaatgttgggctcatactactttgctccatcagtgtga

SEQ ID NO: 105 - DNA, 234 bp, Zea mays
  misc_feature: Incyte ID No: 700142562H1
  unsure 27, 37: a, t, c, g, or other
ccaggtgctgcggccggagatgtcgtngcagctgatncgaggagcaccggtcgggcgcggaggtgcacgtcgggcacgagctgtgcgagcgcaagtcgcgcgagttcatggtggagctgggcctccccgacgggctcctcccgctgcccaggctcgacgaggtgggctacaaccggtcgacggggttcgtgtggctgcggcaggccgccggcctgacccacaccttcgggtcca

SEQ ID NO: 106 - DNA, 179 bp, Zea mays
  misc_feature: Incyte ID No: 700142565H1
cacacaccagcctttttgttctccccgcgagcgctctctttctctatcgactggcgacgactccgccaccgccgccgctctacgcgagacgcccaggtcttcgccaacgacgagcatccgggttagagaggaagaaattgcaaccgaaacaatggcggcagattccggcgctcgcagac

SEQ ID NO: 107 - DNA, 232 bp, Zea mays
  misc_feature: Incyte ID No: 700142566H1
atccaagcaacaaacttggcattcttgcctgttcttaattattgccaggacaggagaaacaaagatgaggcctcagctgatactcgtcggcactctggctgttctcgccatcctcgcagctctcggcgaaggctcgtcgtcctggccctgctgcaacaactgcggtgcttgcaacaagaagcagccgccggagtgccagtgcaatgacgtgtcggtcaacgggtgccatccg

SEQ ID NO: 108 - DNA, 229 bp, Zea mays
  misc_feature: Incyte ID No: 700142568H1
  unsure 123, 154, 181, 183: a, t, c, g, or other
tacgtggactccgcgcacttcgccgtgccccagggcgcgcgcgccgtcgagctggtgggcggccgggagagcgcgctcgtgcaggaggtgcgcaccgtgcccgggtggacctaccgcctcgcnttcgccgtgggagactcgggcgacggctgcncgggctccatggccgccgaggcctacncngcgcgcgccacggtcaaggtgccctaccagtccaggggcaccggag

SEQ ID NO: 109 - DNA, 227 bp, Zea mays
  misc_feature: Incyte ID No: 700142571H1
gggacacaaactgctgcctgtatggactcgtgcgattcagggtgaaccatcagattgtctagtgtcttctttgtaataaatttatctgttcttggtactttgtctatggttgaatcggaacccattttccgtttgcctagattcttaatttctggtgctgtatccagctgaaactagtagatctatgatcttgtggctgcagcatgttcttgtcacttttatctggt

SEQ ID NO: 110 - DNA, 228 bp, Zea mays
  misc_feature: Incyte ID No: 700142574H1
aaccgaccgaacccacatcctgcttactgcccacaagaaagaagctagggaaacccgggggatcggaggactgaggagaggcagaaaacagaaggcccggctgcggctgcggctgcctttggtttcgtcgtcgtctccgcctgttttcccctctttccatggcaggctgatgctcttcaacacacacagtccactgtcgctcctcagttataagtagctagggcatct

SEQ ID NO: 111 - DNA, 228 bp, Zea mays
  misc_feature: Incyte ID No: 700142577H1
  unsure 56, 214: a, t, c, g, or other
ggcagcgatggagaagttatacgactctggcaaagctcgtgcaatcggcgtgagtnacttctcttgtaagaagctgcatgatttgcttgccgttgcacgagtgcctccagcagtcaaccaggttgagtgtcatccggtttggcagcaagacaagctccggaagctatgccaatccaatggtgttcatctttctgcattctcgcctttaggctcncctggatctccttg

SEQ ID NO: 112 - DNA, 230 bp, Zea mays
  misc_feature: Incyte ID No: 700142579H1
ctgggatgttgtcactaatgaggaagctgttgccatggtcaagcctatccaggacccccaggaagcagcaaacaagcttctcgaagaagcttcccgaagggaagctccgataacatcacagttatcatcgtccgcttcatagacggaactaccggtgagaaatcaggcgacgacaaagagaccaccaacgaccaacactcctagctgtctcgtgtagggatccatcgtgc

SEQ ID NO: 113 - DNA, 234 bp, Zea mays
  misc_feature: Incyte ID No: 700142580H1
  unsure 77: a, t, c, g, or other
tctttcagtgcgaggatagctaggcaggaggacgaagagcaacttcgcttgattgaggaagaagagagacgcgagcnggagaggaagaggcgaaagatggcacgaggccgatagtccaacacgcgtcatatttgggtgttataattgcacagacctgattgcctgaagacgaggcccatggtcgatcatacgggcgcgttgcagacaacaggaaaacttgccacgtggattata

SEQ ID NO: 114 - DNA, 226 bp, Zea mays
  misc_feature: Incyte ID No: 700142582H1
cgaaatgatgacgcacgagaacgtctccagagctgtgctggttctccagcagaacctaactccgtttgcgaagtcgtttctcatagagctggagccgaagatccatctggaaattttccaggaggccgagatgcttataaacatcaaggaacatgtccttgttcctgagcatcaggtgctcacaaacgaggagaagaagacgcttctggagcggtacaccttgaag

SEQ ID NO: 115 - DNA, 224 bp, Zea mays
  misc_feature: Incyte ID No: 700142583H1
  unsure 44, 200, 203: a, t, c, g, or other
gccgggaggtgagcgtgcagggcgtgacgctgcagaacgcgcanagttccagctgacgttcacgcgctgctcctgcgtgaaggccagcttcctccgggtggtggcgccggcggacagccccaacaccgacggcatccacctcaacgacacctcccacgtccgcatcacggacaacctcatctccacaggggacgactgcntcnccatggtcggcaattgctctg

SEQ ID NO: 116 - DNA, 222 bp, Zea mays
  misc_feature: Incyte ID No: 700142585H1
  unsure 195: a, t, c, g, or other
gccagtgccagtgccagcgcgtcgtcacttttccgcaacgccttcgtggcctggaggaaaaggtcgcgtgaagtggagctgggacatggtgagctcgcccaggacgatgccgtgctcgcggaagaggtgaaggggctggcgaggctgttcccgatatgggcgacgtgcctgctctacggcgcggtgttcgcgcancgcccacgctcttcacgaagcaggcgg

SEQ ID NO: 117 - DNA, 223 bp, Zea mays
  misc_feature: Incyte ID No: 700142588H1
gaaagcaagacccacccatctccggcaaatttgaccggaccagagcaaagtaattcgactttgaaagatcacccagatcaacaagtgaattcaacagcagtgctgggcaaccaagtacggcctttgactaaccagacgccgtggcccgagttggattctccaaatggcaccttggctctggtaacagatgtccaaaagtccacatctggagctggagatgatg

SEQ ID NO: 118 - DNA, 179 bp, Zea mays
  misc_feature: Incyte ID No: 700142589H1
ctggtactgtggttgcagttcccacgttggttggctgccgtgtccttccttgggctaaggcgaatctcaactacactgcacaagcactcattatatctgcagcctgtattgctggcttcttcatcactgctgacaaaaccattctacggaacgcacgacaaaacaccatcgggaagctt

SEQ ID NO: 119 - DNA, 221 bp, Zea mays
  misc_feature: Incyte ID No: 700142591H1
ctcaggaactacacccaattgcaacgggctgatgataataggtgccagccagtccagtttgtgcaaagatctgccccggaagttccctgactgaatatacttggatacgctcatggttctgcttcggtaccgatatatttacacgtcattttgaaggatgagttctggtgagtacatgtatacaattgtcgctgggaacaaaaactaacggtaattgctgg

SEQ ID NO: 120 - DNA, 224 bp, Zea mays
  misc_feature: Incyte ID No: 700142593H1
  unsure 21, 168, 170-173, 182, 184, 188, 194, 200, 203-204, 206-209, 214, 216,221: a, t, c, g, or other
ataacatgtactgtaattatngccactctacgcagatggaacccgaacgggaaaccagatctgtagagtggccataataacatgtactgtaattcagttcatctacatgccggaccagaagctggggaatcgtgtgaagcttaataattcagtttatctacgtcccanannnnaaaaaaaananaaanaaaaanaaaaanaannannnncaaananaaaanagg

SEQ ID NO: 121 - DNA, 202 bp, Zea mays
  misc_feature: Incyte ID No: 700142595H1
  unsure 50, 62-63: a, t, c, g, or other
ctcctctgtccctctacggtgcttctgctcgccggcccaaaatcgcctantcgaccacgccnnccttccaggctcccgtctccatgggtctcctctcaaacaggattgggagggagagcctcaaggcgggggatcatatctactcctggagggcggcgtgggtctacgcgcatcacggaatatatgtgggcgatgataaggt

SEQ ID NO: 122 - DNA, 227 bp, Zea mays
  misc_feature: Incyte ID No: 700142596H1
  unsure 220: a, t, c, g, or other
atgaaacactgagagccagtccgcagtggaacgagacggccctgattatcacatatgatgagcatggtggattctatgaccatgtacctacgccggtcgttggagtgccccagcctgatggaatagttgggcctgatccatactacttcaagttcgaacggcttggggtgcgagttcccactttctcatctcaccttggatagagaagggcactgtgatncatgaac

SEQ ID NO: 123 - DNA, 264 bp, Zea mays
  misc_feature: Incyte ID No: 700156401H1
  unsure 215, 252: a, t, c, g, or other
ggatgacaagataatagcagtatgtgctgacgatcctgaataccgtcactacaacgacatcagcgagctgtctcctcaccgcctgcaagagatcaagcgcttctttgaagattacaagaaaaacgagaacaaagaagtcgcagttgatgcattcttgcccgcgacaacagctcaagaagccattcagtactccatggacctgtatgcccagtatnttttgcaaagcttgaggcagtagattgcaagcaacanttatctaccatg

SEQ ID NO: 124 - DNA, 252 bp, Zea mays
  misc_feature: Incyte ID No: 700156403H1
  unsure 46, 170: a, t, c, g, or other
atcttgctgaaaacgtcgttgtggtgagagagggaaggcggtcaangagtaatttgggtcgtcgtcggtggttctcatcgatactaggtttccgttctcggggtgtggccgaggagggtcgccaacgcctcgggaagtcgtccgtgaccgcaattggaaggcgggacccncggaccgtgggcgatttctcgccgtcgaccgaactccatcgtgggtagccctgttccgtgaccgggatttctactgtgtcac

SEQ ID NO: 125 - DNA, 210 bp, Zea mays
  misc_feature: Incyte ID No: 700156404H1
  unsure 87: a, t, c, g, or other
ctatgaattcaattatttctggcagaatgtcgcagtctagcgagctggcccatcccattgagaaacattccatcggctgcatgagtncgccatggacgggagatggatgtgccgaattattggagggaaagggttcactttattcgtgcctagtcatcagtgtcatcagtacggaggttacagcgtatccacgtggtctgccacgtcatg

SEQ ID NO: 126 - DNA, 118 bp, Zea mays
  misc_feature: Incyte ID No: 700156405H1
  unsure 45: a, t, c, g, or other
atcctgtaatggaggatgaggacttgggtagcaggagggaaaggnttttttctttatctactggtactgtacgtgcacgtgtttttgaccgttttcttttcgatacaccattcacaaa

SEQ ID NO: 127 - DNA, 140 bp, Zea mays
  misc_feature: Incyte ID No: 700156407H1
agaagttcgtcttcgtgccggacaaggacctggacaggacgctccgcgaggccatcgacgactcccagctgccggagatctatggtggcaagctcaagctcgtcacgccggctgcaaaattaccaagccactttaggcta

SEQ ID NO: 128 - DNA, 244 bp, Zea mays
  misc_feature: Incyte ID No: 700156410H1
  unsure 17, 23, 69, 74, 87, 102, 148, 211, 215: a, t, c, g, or other
gcgtgtgccaacatganttctgntctgcaggtctggagacgacacgggtgtttatggtgttcggttcgntcttnccactttcatcantgatgccatcctcantcatcttgggaataagcgtcctcagcgcgaagacggtggccgagtnggtcgagaacaaggcgacgcgcacgcccaccgtgccggccaggtcaagcacccagttcatggngacntcagccacgacccaccgagtcctctgagt

SEQ ID NO: 129 - DNA, 225 bp, Zea mays
  misc_feature: Incyte ID No: 700156413H1
  unsure 20, 97, 195, 211, 213, 219: a, t, c, g, or other
gcgagcctcaagcagcgaantaggcagctcgagtggtgatgtgcatcgccctgtctgcaggcttgctgctcggctctaccatgattctcctgcgcanttgctggggctacatgtacagcaacgaacctgaagtcgtcacgtacattgctaggatgatgccggtcctggcgatttcgtttttcacggatgggctcnacattgtctatcaggngncctgantgggtg

SEQ ID NO: 130 - DNA, 227 bp, Zea mays
  misc_feature: Incyte ID No: 700156414H1
  unsure 95, 176, 202: a, t, c, g, or other
ggtggagtgggttctcaacaactcgtcctcgtcgtgaacaaaacccataccccccctcgtatcacaatgcctttccatgcgtttttttttcctcntcttttgtgctaccattccatagttgcaaactgcagagcgcctcttggcatgccaagtgtgcgtgtggtaccgttgcgatngaataatcagcatgggtagtggtgtngggtcctttccctgaaactgaaaga

SEQ ID NO: 131 - DNA, 74 bp, Zea mays
  misc_feature: Incyte ID No: 700156415H1
  unsure 37: a, t, c, g, or other
atgtaataacaataacacgatgtgtgactttttagcnttcagttttgccttttcgggctttgacaggcgcaatc

SEQ ID NO: 132 - DNA, 240 bp, Zea mays
  misc_feature: Incyte ID No: 700156416H1
gttgaataatcatgatcatgtgggtttaggtgtcgtgctcacgagtatgtagtgtagctcctgctagcacagagcacagcacagagccactgggcgatcgacgggccgtgcatggcctgtagataccatctcatatgttcaccactgctactttgctcatgttgggggcctctcctgaactgggttcctggatgaactgattttctattagtttccggaatcgatgctccagttgcgacc

SEQ ID NO: 133 - DNA, 176 bp, Zea mays
  misc_feature: Incyte ID No: 700156418H1
  unsure 135, 167: a, t, c, g, or other
actcgatgaaggggatgccagtggcaagtcaaagcaaagcaggagtgagaagaagagccgcaagccatgctgaagcttggcatgaagcccatcactggtgtcagccgcgtcactgtaaagaaaagcaagaatatnctctttgtcatctccaaaccagatgtttcagngtccgaatt

SEQ ID NO: 134 - DNA, 252 bp, Zea mays
  misc_feature: Incyte ID No: 700156419H1
  unsure 139, 225, 246: a, t, c, g, or other
cgtgaaagacgctggtggggaagacgatcacgctggaggtggagtgcagcagcaccgtgcgagaacgtgaaggccatgatccagggcaaggaaggcatcccgccggaggagcagcgcctcgtcttcgcgggcaagcagntggacgacgacggccgcaccctggccgactacggcgtccagaaggagtcgacgctgcacctggagctgcgcctccgggcggcagcnggggcggctaccccatggggntcccgc

SEQ ID NO: 135 - DNA, 240 bp, Zea mays
  misc_feature: Incyte ID No: 700156422H1
  unsure 7, 65, 93, 180, 238: a, t, c, g, or other
atgggantatcacaaaggaagctggcccagtgaacatgaatttcactataccgatgtacaatgcntcaaagttgcaggtcaggtatcttcagntcgcaaagaaatcgaaggcatacaacccttatagatgggtgcgatacgttacacaagccaactcctacgtagctcgtctatgaggantcagcatctgtactcttgtttccagtccattttttttgggtgtaatatttgagcgttntc

SEQ ID NO: 136 - DNA, 237 bp, Zea mays
  misc_feature: Incyte ID No: 700156423H1
caacactatacagctcgaggctgcatccttcactttctggaaaacttagtgcatctgcaagttatgaagatgatatttctggtctagtggaaaaccatcaagaattcattcatgtaatgaaatctcgactaacaaaactagaggtggtttaccgttgctggcaaagaaatgatataaaaggatctattgatgctacatggagaatgttggattttgctgtcactaatgatattgcta

SEQ ID NO: 137 - DNA, 238 bp, Zea mays
  misc_feature: Incyte ID No: 700156424H1
  unsure 210: a, t, c, g, or other
ctgggggtgcattcacttccctgctgaagtgaaaagaaagtatgattgggtccagcctaggctcccccatagatatagctctttttgagagggaagagggattaattcagcagcaggttctttttataaattctttgttgttatgaagcaggcggtacttttgtagttgatgaaggggatttgtcgccactgtcatttacataattcggncaataatttatattgtgtaatcttgaga

SEQ ID NO: 138 - DNA, 135 bp, Zea mays
  misc_feature: Incyte ID No: 700156425H1
  unsure 6, 10, 13, 61, 73, 85-86: a, t, c, g, or other
cggacntggncgngagcgcgtgggcggacgcgtgggcagtgaccaactcgaagcttgcgancttgtagtagangtcggcagcaannggtagagcgagaggtcgagaagatgaagagcagcactctgttggcgatc

SEQ ID NO: 139 - DNA, 242 bp, Zea mays
  misc_feature: Incyte ID No: 700156426H1
  unsure 77, 148, 151, 207: a, t, c, g, or other
gtctcaggcgcatcggcctcgccgctgcacaacgccggagacgagacgacggcggctgcgggatgacggtcttccanttcctcaactgcgccttcctcaccttcggccctcacgtcgtctactactccgccacgcccctgtcagagtntgntacaatcggcacttctataaaagcagctgctgtttatcttggaactgcgcttgtanagttgtttgcttggcaacattgctcaaagtacctg

SEQ ID NO: 140 - DNA, 242 bp, Zea mays
  misc_feature: Incyte ID No: 700156427H1
  unsure 238: a, t, c, g, or other
gccgaagtaaagtggacaaggagaagttgacatctggtactcgtgttgtacttgacatgacgaccttgacaataatgcgcactcttccacgggaggtggatcctgtggtatataacatgcttcatgaagatccaggaaatgtcagttactctgctgtaggtggtctgtctgatcagattagagagctcagggagtccattgagttaccacttatgaatcctgaactctttcttcgggnggga

SEQ ID NO: 141 - DNA, 244 bp, Zea mays
  misc_feature: Incyte ID No: 700156428H1
cgcgtctaccttagacagagaatggatccacaggcagaaccagtttcaaaagatgggctatcgggacggaataacacaagggcagaaggactctgcccaggaaggcttcaatgctgggttcaggcaatctgtaaacgctggctacaagtggggccttgttcgcggggttgccagtgcgctaccaatcttccagacagcttgaaagagaaactggtgccggacgtccagtgcagagggaaactac

SEQ ID NO: 142 - DNA, 143 bp, Zea mays
  misc_feature: Incyte ID No: 700156430H1
cttcatcgagaagatcttcagcagtcagagctcgttgtgtactaatgttcccccatgttctgtttctcgttctgattctgcaattcgtcatattgttgaatttaatggttatgtggaatcgctaaaaagacatggtcatccgt

SEQ ID NO: 143 - DNA, 230 bp, Zea mays
  misc_feature: Incyte ID No: 700156431H1
  unsure 130: a, t, c, g, or other
tcttccgtaagaaggaagtggcctgatctcagatttcaaaagtagtcagtgctggatgaagaatggtctcgcaatgcaagactcgatggtacgaaggaaaacgatgcgcttggattccgtgaaggaacgntttctttgtcagcacctcagaatttggccacttgaaagaatctgatgcttgaagtttcctggttctgtgtacacaagtcggctcaatgtcagaattgagc

SEQ ID NO: 144 - DNA, 161 bp, Zea mays
  misc_feature: Incyte ID No: 700156432H1
ccctaatccgagcacccagcgtcccagcccctacccgcttcctctcgcgccggcctttggggctctcaccctgagcggtaggaatccgcagggctccagttgggtgccagaagcatccaagtcgttggcgggagaccgggaaatggcggaaaaagaagggg

SEQ ID NO: 145 - DNA, 253 bp, Zea mays
  misc_feature: Incyte ID No: 700156433H1
cttcaagtctacaggcaaagtatatgaataagaacccgaaacagaaggaaccagcacctggccttgtatttttccacattccactaccagagttcagcagttttacggcatccaatttcacaggagtaaagcaggagggtatcagctcagcatcaattaactctgggttctttgcctccatggtggaggctggagatgtgagagctgcctttgtgggacatgatcacattaatgacttctgtgggaagctcag

SEQ ID NO: 146 - DNA, 83 bp, Zea mays
  misc_feature: Incyte ID No: 700156434H1
  unsure 2, 40: a, t, c, g, or other
cnacatgtcgtctccgccgccgccggtgaagctgatcggnttcttcggcagcccgtacgcgttccgcgcggaggcggcgctgt

SEQ ID NO: 147 - DNA, 155 bp, Zea mays
  misc_feature: Incyte ID No: 700156435H1
  unsure 29, 113, 126: a, t, c, g, or other
ctccgttggaagatgacactagtgtgtantaatctgtattatatcggttgttgttggttcgttgtagtgtattggagcactcttgcgaactcaatcccacatgggaggattcntcttgtacataanttaccgagaaatattggggtttgccattt

SEQ ID NO: 148 - DNA, 211 bp, Zea mays
  misc_feature: Incyte ID No: 700156438H1
  unsure 21, 28, 31, 52, 83, 110, 132, 141, 151, 170, 173: a, t, c, g, or other
tggtctatatgtgacagtctnaagcagnagntgctagtttctcaggacccgnataagaaccaagagatgatgagccatgtcgntgacgaattgaagctgcgtatacgatngttcgttcagtatcttctgagnctcggtganaagaaaaccngcagcagcgagaccaggcnganctttctgagcatcgtgaaaagctgttactacgctgctc

SEQ ID NO: 149 - DNA, 229 bp, Zea mays
  misc_feature: Incyte ID No: 700156439H1
  unsure 42, 223: a, t, c, g, or other
ctgccactacagcgcctgtaactgccgcacttgcccgacatntggctgggcgtgctgcagcacttgctgctagctagctagctagctagctagtgtgagttcttccgcgcgcgcgcgcccagcctttgcatacccctcttgcttagctcatgtccagtagtagccggttgctgccctcgtcgtcggcggcgtcatctctggcgtggttacgttctcatctggngtggtt

SEQ ID NO: 150 - DNA, 220 bp, Zea mays
  misc_feature: Incyte ID No: 700156440H1
  unsure 8, 54, 177: a, t, c, g, or other
cgtggatnccaatccgtgccctacatctacctcggcagcggctccacggtggangacctactgaaccggaccacctccgcgtccgtgttcagcagcggctacaaggccacgtccgactacgtccggcaggccatcccccgggacgtgtgggccaacatattcagcaggctcgcgcanccaacgcggggctcatgattctggacccctacggcgcgcagat

SEQ ID NO: 151 - DNA, 225 bp, Zea mays
  misc_feature: Incyte ID No: 700156441H1
  unsure 25, 34: a, t, c, g, or other
aagaccggcggcgatggcggcgaantgggcgcantgcgcacacaggtaacgcgtgcggcggagttcgcttcgaagcacggctgctcctactacaaggaggtaatggagaagaacaagcagtacgtcgttcagccccccaccgtcgagaagtgccaggagctctccaagcagctcttttacacccgcctcgcaagcctaccaggtcgctatgagtcattctggaag

SEQ ID NO: 152 - DNA, 235 bp, Zea mays
  misc_feature: Incyte ID No: 700156442H1
  unsure 7: a, t, c, g, or other
caaaaanttagcattgctttggatggtatgcggtagagctgcaagttccgtatccagtccagtccagtgaggggaattgctttggatggtgcagggcagatggaggggctgacgtccagtgagatcgccggattcgtggtgggtgccctgctgctcggcgccaccatcgctgcccccaaggtcgacggcttcatcgcctcctcccagagaaggtcactagggatgtgtaagaggt

SEQ ID NO: 153 - DNA, 171 bp, Zea mays
  misc_feature: Incyte ID No: 700156444H1
  unsure 147, 165: a, t, c, g, or other
gtcctggcatccgcagagagtttgttccgtccaggcaaccaaaaagcgttgccccgccgcgcagaggaagaagagagcagaggaggatggctcgtacgaagcagaccgcccgcaagtccacgggaggcaaggccccccgcaagcagntcgccaccaaggcggcgnggaatt

SEQ ID NO: 154 - DNA, 246 bp, Zea mays
  misc_feature: Incyte ID No: 700156445H1
  unsure 210, 228, 231: a, t, c, g, or other
atgttccatcaaaagaggatcttgcgaccgcaggaaaccactaagaggccaacttgttgcgtcctggttctgaccaaaccaaacaagggggagctcagtgacgaggtgaaggataaactgaagtcagactatgaccaagttgtaacggaagttgctgaggctacatctgcaatgttctaaggaccattcagggaccacatcatctgagantcatgcagctacattctnggngtactatgtaacctg

SEQ ID NO: 155 - DNA, 248 bp, Zea mays
  misc_feature: Incyte ID No: 700156446H1
  unsure 40: a, t, c, g, or other
gtgtcactgtccaggcgcatcgcagcgacgttcctcctgntgaccatagccgacttcagcgaccagctgttcgactggcaggaccgcctcttcgacaacagcaacggccgcctcgagttcagcggcaacacctggacctccctctggcccggcaccggcaagcctggcctctgggtcacctctagctcccgcatggccgcgctctacaccctcatcgtccgcgaggaggagatacacatcacgcagcg

SEQ ID NO: 156 - DNA, 178 bp, Zea mays
  misc_feature: Incyte ID No: 700156447H1
  unsure 9-10, 13, 21, 34, 48-49, 53, 85, 106, 108, 125, 168, 175: a, t, c, g, or other
cgcctgcgnnttnccttcccnaccagcccgtctntctcttctctctgnntctntctctcgtagccgcgtccacctcgcagcagcnagcaagcgcgaccaaatggcncntctaggagacggcggantgctgccgcggcggcgtccaacaacctggtggtgtcgttcggngagatgntga

SEQ ID NO: 157 - DNA, 255 bp, Zea mays
  misc_feature: Incyte ID No: 700156448H1
  unsure 206, 218, 223, 239, 241: a, t, c, g, or other
ggacgggcatcggctctgcgccgggtgctcgacagcatccaggacgaccttagagccgacagggaaagggacaactccgtcctcatcaacgccttcaaccaagccctcgcctcgcaaggctcggcgctgctggatgccgacgaggcccgagacggccgaggtggatccagcaacagcaacgacgatggcttgctggaagagtatgntgtcctgggggntgggntgagcctactgttcananctggcctagaacgg

SEQ ID NO: 158 - DNA, 113 bp, Zea mays
  misc_feature: Incyte ID No: 700156450H1
gatttctagatacgatacttgtcaaaaaaaaaagaattcatggagaaacaacggctgtgataatggtttttttgtaggaaccttttctttatacaattatactattgattaat

SEQ ID NO: 159 - DNA, 272 bp, Zea mays
  misc_feature: Incyte ID No: 700156451H1
  unsure 3: a, t, c, g, or other
gangatggctgtgattactcaaggcgctgatccagtggttgttgctgaggatgggaaggtgaaaacgttccctgtgatcctattgcccaaggagaagcttgttgacaccaacggcgcaggtgacgctttcgtcggaggctttctctctcggctggtccagggcaagagcatcgaggactgcgtgacggctggttgctacgccgccaatgttatcatccagcgcccaggttgtacctacccagagaagcctgacttcaactagtgcaatactc

SEQ ID NO: 160 - DNA, 269 bp, Zea mays
  misc_feature: Incyte ID No: 700156453H1
  unsure 86-103, 165-197: a, t, c, g, or other
gaagaatctagctaggagcaggccgcctacgccatcggccgtccacagcaacatgtgctccggctcctggttctggagcggcaggnnnnnnnnnnnnnnnnnnaggagcgcccgtctcttgtcgtcgtcaacctcgagcggcagtaaagaagacgctgaccgtcnnnnnnnnnnnnnnnnnnnnnnnnnnnnnnnnnaggttgcgagccggaggagcagaggccatggagatggtgaacctgaagctgtacctggagaaccggtgcatc

SEQ ID NO: 161 - DNA, 270 bp, Zea mays
  misc_feature: Incyte ID No: 700156454H1
  unsure 72, 263: a, t, c, g, or other
gggaaatagaggatactgtactcttagctttacagagtcctgaagtgtatgatgatattgctcgcggcacgngctgcaaatttgagacaaatagacctcgcgctgttctttttgagggcccacctgggacaggcaagacatcttcagctcgagttattgccaaacaagcaggaattccactactatatgtgccacttgaagttgttatgtcaaaatattatggcgaaagtgagcgtctattgggatctgttttttcacttgcnaatgatc

SEQ ID NO: 162 - DNA, 271 bp, Zea mays
  misc_feature: Incyte ID No: 700156455H1
agttgtcggtcgcccgcgccgtcgtctccgctccgccggccttcctgcgaaaccctagcgaggcgagcgagagagaaactagcggccatgttcggctacaggaaggctgacccggacctcgaggccggcgggtcctcgctgctgtacccgggaatgacggagagccccgagctgcggtgggcgttcgtccgcaagatctacgtcatcctagccgtccagctcgccatgacggccgcggtctccgccttcgtcgtcaaggtgcccgccgtct

SEQ ID NO: 163 - DNA, 260 bp, Zea mays
  misc_feature: Incyte ID No: 700156456H1
ttctgtgttccctgagatcatatttggtagagtggaattgtatcagccagtcgagagcttagttcccgaatctttttttaatcgtaacggaaaatttgtccgtcatccttctgatgagaggaactcattaaacaggcgaaataggtcttttttgcgctgggaaaagtttgcgcttgatgcataataatttttaggacggcaacgctcttagagcgcaggttttgttcacctcctgtaccgaggaatgcttactaagtccc

SEQ ID NO: 164 - DNA, 271 bp, Zea mays
  misc_feature: Incyte ID No: 700156459H1
cctcccacaacactcagtggtactggagttgaccggatggcattccttcaggctaatataacccgtgacaatactgagtttgtgaatggtgcaattgttggagacagatacattttccagctagaccaaggtcttggcatcgggagcaaaaacccattcttcaaccgtcatcaactgactctgaccaagttcatcaatttaaataagcaagagaaaggtgctggcaagccactaccagctgttttggttcttcatagtcattatgctggtt

SEQ ID NO: 165 - DNA, 270 bp, Zea mays
  misc_feature: Incyte ID No: 700156461H1
  unsure 25, 31, 53, 76: a, t, c, g, or other
cagccagtgagtactgactgagtancccgangctcagagcaagcgggtgccanctgccaaggggggtgatggcgcngtctcgacgcatggcggctcccgtcctcgtcctcctgctcctcctcgtcgccacagagctggggacgaccaaggtggcggaggcgaggcactgcctgtcgcagagccaccggttcaagggcctgtgcatgagcagcaacaactgcgccaacgtgtgccagaccgagaacttccccggcggcgagtgcaaggcgg

SEQ ID NO: 166 - DNA, 51 bp, Zea mays
  misc_feature: Incyte ID No: 700156462H1
atggatttctagttttgattgaatgcatgaaagacaggtttatcagtaaaa

SEQ ID NO: 167 - DNA, 271 bp, Zea mays
  misc_feature: Incyte ID No: 700156463H1
aacaaagccaacgtgatcagagagggatatatagctagctagctagcatagcatggcgcttgtagccgacgacgacgccgagctcaaggccaaggccaaggccaaggccgaggtctactacggcgacgaggcctgtcagctgtgcgcgcactcctgctgagggaagcaggcctccccaacggcctgctgccgctggaggacctgacggagtgcggctacgtccaggagaccgggtacgtgtggctgaagcagggcaggagggtcgaccacg

SEQ ID NO: 168 - DNA, 162 bp, Zea mays
  misc_feature: Incyte ID No: 700156464H1
gtgttgttggtggtgtgatgatttatttgtaggttgtggtgttggcttgctcgtgcctcctccttctcaggccggccgggatggtccattcaattattttcttggcaaacaaaaacaaattgggtcgggttggactggccgctgatcggcgaggccaggcga

SEQ ID NO: 169 - DNA, 262 bp, Zea mays
  misc_feature: Incyte ID No: 700156467H1
  unsure 256, 258: a, t, c, g, or other
gggcgggcgctgccgccgcagccgaccgtgaaggtgtactgccgcgccaaccccaactacgccatgagcgtccgcgacgggaaggtggtgctggcgccggcgaaccccaaggacgagtaccagcactggatcaaggacatgcggtggagcacgagcatcaaggacgaggaaggttacccggcgttcgcgctggtgaacaaggcgaccggggaggccatcaagcactcgctggggcagtcccacccggtgcgcctgntnccta

SEQ ID NO: 170 - DNA, 263 bp, Zea mays
  misc_feature: Incyte ID No: 700156469H1
tttcaataatctgcattgttgaatttgtgtgctttcgcgtcatttgttgctggttgcattgtgttcttccaccattcaaaccctagcgccgccaccatctcccgtttgatcacgccacaaaccgagtcaacatcgtttccttatttttctccttcggttacgtcaaaaaaaacagaaaaaaacaaaccgagtcaacggccgtttccttgattttctccttcggttacgaaaaaaaacagaaaaaaaaacaaaccgagtcaacg

SEQ ID NO: 171 - DNA, 262 bp, Zea mays
  misc_feature: Incyte ID No: 700156470H1
gcaagagagagcaagagaagaggttttgagccactttggaagaaccacaccagattatgatagcttgagccgcctcaagactgtaaccatgattctacatgaggtccttaggttgtacccaccggcaacctttctaaccagaagaacttataaggaaatggagctcggtggaatcaaatatcctgcaggagtggagctccttctgcccgtcatcttcattcaccatgatcccgacatttggggaaaagacgcaagcgagttc

SEQ ID NO: 172 - DNA, 266 bp, Zea mays
  misc_feature: Incyte ID No: 700156474H1
  unsure 14, 80, 93, 111, 144, 154, 165, 213, 235, 242: a, t, c, g, or other
cgcggccgccggcnacggcgggcctctgcggcatcgccatggaggcgtccttccccatcaagacctcgcccaaccctgcngacccgccgcgcnagccccgccgcgcgctcntcgccagggacacctcttcttcccagtgacacncacgaccacnactggcacgtnagtacacgttgccaggaatgacatgctatgctactagtgtttgcttgnactattatcgattgggtttgtnctagtgntgacagtttcatcgattgcgcggt

SEQ ID NO: 173 - DNA, 265 bp, Zea mays
  misc_feature: Incyte ID No: 700156475H1
  unsure 77, 113, 264: a, t, c, g, or other
gatgattctgagttccgtaatgctttttcaaggacatatgtccgggtgagggagtatgatgctaggcgcagcgtgtnctcgctccagaggcagaaaccgctctaagtcaagangcagaagccacagccattcgtactcaagaagcagaagccgcagttatagcaagagcaggagcccaagatctagatctgcttcagagtcaaaatcacctgttaaggcaagatcaccatccagatccccctcctatttctccccggcgtgacna

SEQ ID NO: 174 - DNA, 263 bp, Zea mays
  misc_feature: Incyte ID No: 700156476H1
  unsure 262: a, t, c, g, or other
caccgctttacgttggatagtgacaactacatcaaggcaatgcgtctatttgtgggcgagcctgtctggacaccatacaatcgtccgcatgaccatctcccggctaggaaggagtacgtcgagaaaatcatcaaccgaggtggaaaccaagccgtcgaagctcgttgagcgtgtccactctacatgtcctcctgccgtctcagcctcttgtgttttacactctacaactcctagtaccgccgaataagatttgctatctgcna

SEQ ID NO: 175 - DNA, 265 bp, Zea mays
  misc_feature: Incyte ID No: 700156480H1
ggacggtgagaagggcaaggatcttgcggtttgcgatgatggtgaacctgagcctcgcccagtgttgcaacagaagcatggtgccttcggggacagcttgtcggagtgcagtggggtgcacaccgacaacgatttcgtcgaggagttgccatggttgaagtaccacggatacgagtatgatgatagcttggacgatgagatcttggaagaacagagaattggggaacaggaggttgttggagcagagttttctgtggagcaagaa

SEQ ID NO: 176 - DNA, 129 bp, Zea mays
  misc_feature: Incyte ID No: 700156481H1
gtgtcaggcttcattcgtttattttttttaccctgggattttgtctttgtaaaggggtgtaaacagaagtatatgatatggttaggttctcatacggaatggacgtttgcgactttgcagtctcttacc

SEQ ID NO: 177 - DNA, 128 bp, Zea mays
  misc_feature: Incyte ID No: 700156482H1
gaaagaaagcagtcaggagccattgaaagaaagcaatctgttgagagctctgggacagcagtcacggataacgagctgtcagccgatggacctgggctagagatcaacgatgctgctacaaccaccac

SEQ ID NO: 178 - DNA, 213 bp, Zea mays
  misc_feature: Incyte ID No: 700156483H1
gggggttaagttttaggttttaggttgtttatttagggtacatagaagcagaaaggaaaaggttgatgccttttacttagatgtcattaatttggagcactccttttcttgctctatccattttctgtttgtaattttcgttgggcttcggcaaaaaaactaacaaacaagttgtgctccaacttctaatatctgattcaatgtgaaatggaa

SEQ ID NO: 179 - DNA, 256 bp, Zea mays
  misc_feature: Incyte ID No: 700156486H1
ctcaacccaggaacagagcgaggcgacgccgcggcacctcttctccggcgaagggaaatggcaaccgttccaggggatctgatctggcaggttgtgaggaagaacaactccttccttgtgaagcagttcggcaacggcaatgccaaggtgcagttcaccaaggagccgaacaacctctacaacatccactccttcaaacactcgggtttggcgaacaagaagactgtgacgatccagccagctgcaaaggactcgg

SEQ ID NO: 180 - DNA, 256 bp, Zea mays
  misc_feature: Incyte ID No: 700156487H1
gtctcaaatggagggcaacttataagccagaggatattcgctggcctgatgtttctgttgaagcggaaacgggaaaaatgtacaaggcaaattttcgagatagagaggggagaactgtaatcattatgaggcctacaaaggagaattcaacgtcccatgacggtcagattcggtttcttgtgtatgttttggagaatgcgatcctggaccaacgtgaaggtcaagagaaaatggtatggctgatagacttcacagg

SEQ ID NO: 181 - DNA, 256 bp, Zea mays
  misc_feature: Incyte ID No: 700156488H1
cgccgcactacgctcccaccgtgtgatagctgctgctcctggcctgctacgacctcacggccacctctgtcctgtcccactagactagctgcagctagcgcctctttccctcgccgccgccccctatccgagagcgacgagcatggcgcactccctcgccgcctccttctcgccggccgccgcgcgcgccaggtgacaaatgtgatttcaagccggagctcggtttccttccagagccacaggatgacttctgtat

SEQ ID NO: 182 - DNA, 256 bp, Zea mays
  misc_feature: Incyte ID No: 700156489H1
  unsure 69: a, t, c, g, or other
ggaggatattgaggctgcacccagcctgccgacgggcattcaagtacagaatggctccaagaaccgcangaggaggcagcccaacgtacagaagaccacggcgactccaacaaggtcgcctgcaagggtcagcgtcgaaagaacaacgatgccatggtcaaatcggagatgggcttgattgagcagagtaaacttgtgctgacggaacaagagccagagctgggagacgttccggtgaagagacccgttgggaggc

SEQ ID NO: 183 - DNA, 246 bp, Zea mays
  misc_feature: Incyte ID No: 700156490H1
  unsure 62-63: a, t, c, g, or other
agctatttgaaagagctaacggtgaatcttcacacgtcctccgaatattcgacgacgaagcnncaagcaaagcaatcagcccgtaactcctcacgaatgctcgaagaagcttatgagacaggagtgggtatccttcacaagtacgctgaccagagggatcggctgaagagtgctcaaaggaaagctttggatgtcctgaacactgtcggtctgtcaaactccgttctgaagcttatcgagaggcgg

SEQ ID NO: 184 - DNA, 255 bp, Zea mays
  misc_feature: Incyte ID No: 700156491H1
cttggcatgagaggaagcgacacatgtgaacttgtttttgagaactgctttgtgccacgcgagaatgtcctcggtgaagaaggcaaaggtgtttatgtcatgatgtcagggcttgatctggaaaggcttgtattagctgcgggccctattggccttatgcaggcatgccttgatgttgtacttccatatgttagacagagggagcaattcgggcgtccaattggtgaatttcagttcatacaggggaaaatggct

SEQ ID NO: 185 - DNA, 90 bp, Zea mays
  misc_feature: Incyte ID No: 700156495H1
  unsure 74, 87: a, t, c, g, or other
atgcccggtgttgactactccagtcggtaatgagatttcctgcaggaacttgtctattgatctttgtaagttanttatttatatgantaa

SEQ ID NO: 186 - DNA, 258 bp, Zea mays
  misc_feature: Incyte ID No: 700156496H1
  unsure 65, 79, 115, 186, 193-194, 212, 230, 243: a, t, c, g, or other
gttggagcagcaagagtgcagtaattcagattctgtgatttgactcaataattgacatgattgcnttattgagattatnacttggagctgattatattcgttatctatgataganacctccaaatatgataagtttccctgtgaaaccatgctattttagccacgctggagttggttaaagcaccngttaacnncttccttttatgcataanacaggagatgaacctggnggcacctccagcnttgggaggtggatgt

SEQ ID NO: 187 - DNA, 247 bp, Zea mays
  misc_feature: Incyte ID No: 700156506H1
  unsure 25, 76, 79, 88, 152, 171, 189: a, t, c, g, or other
cttgaagatattttcaacagatatnaagaacctgatgctgatatgataatggtggaagaatatctcaattttgcantgntctgcatgntgatcctcaggatattgtcatgcttgtcatatcatggcacatgaaagccgccacaatgtgtgantttactcgtcaggaattcnttggtggactgcagtcanttggggtagattcaatcgagaagtttcgtggaaaattaccatcattacgagctgagct

SEQ ID NO: 188 - DNA, 193 bp, Zea mays
  misc_feature: Incyte ID No: 700156511H1
  unsure 92, 188-190: a, t, c, g, or other
gtgcgcttcggcttcaggctgtgagaaaaaaagaagaagaaaaaagaaaacctcagcctgagggaacgatgcctctgattctgtcgattgtntgcattctttttctgctggccatatctccagtggctctttcgatttccaacaccacaagctgtaagtaacgtgttcttcttgtgttctgggaaaannngga

SEQ ID NO: 189 - DNA, 152 bp, Zea mays
  misc_feature: Incyte ID No: 700156513H1
  unsure 85, 88, 109, 116, 124, 126, 132, 142, 144, 148: a, t, c, g, or other
gtgccgcactgtgttgtaatgaactatttgtggtcgttggagttgtgtccactacctccagaagccaataactggtcgacgaatntgntaacgggtttggatcctaganaaagaanaaaaaaananaaaaanaagaagaagnanaaanaaaa

SEQ ID NO: 190 - DNA, 257 bp, Zea mays
  misc_feature: Incyte ID No: 700156515H1
  unsure 5, 60: a, t, c, g, or other
gaacntggtctgcattgctcagtgtagagaggggaagaggaacaggagcaggaacagaangagagagagagcaatggggaacaggcacctctgctgcctgtgcttgctccttctcctgggactggcgtccggccaggtcctgttccaggcgttcaactgggagtcgtggaagcagagcggcggatggtataacctcctgatggggaatgtcgacgacatcgcctccgccggcgtcacgcacgtctggctcccgccgc

SEQ ID NO: 191 - DNA, 244 bp, Zea mays
  misc_feature: Incyte ID No: 700156519H1
  unsure 104: a, t, c, g, or other
ctcccactcgcggtcgcggtagccggcggcggcggaggaggaaagcaggcaggccatggcgtcgtcgtcgtcgacacccggcggccgtccgcgagatgcagaangatctcgaggtccaggccaacgccctcagcaagatccagaaagacatcgccaagaaccaccaggtccgcaagcagtacaccatccaggtcggcgagaacgagctcgtcctcaaggagtggagtgctcagcgatgggccat

SEQ ID NO: 192 - DNA, 245 bp, Zea mays
  misc_feature: Incyte ID No: 700156520H1
  unsure 69, 117: a, t, c, g, or other
tacaaggctaagaccaagagcagcgagacccgctacaggtgcatctggggcaaggtcacccgcccgcancggcaactcgggcgtcgtccgcgccaagttcaagtccaacctcccgcntgagtccatggggcgcaaggtcagagtgttcatgtacccgagcagcatctaaggttaggtttttgttggagtaaaggtggactctaaatggccatgcttagttcttctctctgagcttaaaatgccat

SEQ ID NO: 193 - DNA, 244 bp, Zea mays
  misc_feature: Incyte ID No: 700156521H1
  unsure 89, 163, 175: a, t, c, g, or other
aacggccaaacctccttggacacgactcgccgcacccatccccatccgccgccgctgccatggccgacgagattgacacgaggccggcntccgcgggctcccggggccgtcctgcgcacgctaccgaggacgacgacagagaggagggcgagatcgccgccgncgccccctcgcncgccctccccgccgcgcacccgctcgagcactcgtggaccttctggttcgacaacccgcacggcaaaaa

SEQ ID NO: 194 - DNA, 243 bp, Zea mays
  misc_feature: Incyte ID No: 700156523H1
  unsure 237: a, t, c, g, or other
gcttcggtcctttctgttccatacgacatgcctagctggcttccttctaatgtctcgctacttgctcgcttcatccgggagcctccccccataagatcaacagtcacgaaagctgttgcagaatttaagcgcacccatgctgacacatggagcatccagaaggacgcattcactgaagacgaactggaggttctccgtgatacatcttcctcctcgtcgtacttcgcttagattaanatttca

SEQ ID NO: 195 - DNA, 243 bp, Zea mays
  misc_feature: Incyte ID No: 700156524H1
  unsure 153: a, t, c, g, or other
agagagtccatctgctcgttgccttgattttgtggaacgaagcgatggctcgcagcggcgccatggtttcctgcatgctgctcctggtggtggcgcaactgctcatggtgatggccacgcagacagcggcggcggcgggcgaccaacgcggantggacgccggctgctgtggcaggtgacctgccactacagcgcctgtaactgccgcacttgcccgacatatggctgggcgtgtgcagcatt

SEQ ID NO: 196 - DNA, 188 bp, Zea mays
  misc_feature: Incyte ID No: 700156526H1
cactatagaccacagccagtcagccacatcactagctatctgtgcagaggcaatggcgtccaaggttgagctggtggtggaggtcaagtccccggctgacaagctgtgggcggcgctgcgtgactcgacggagctgttccccaagatcttccccgagcagtacaagagcatcgagaccgtcgaggcga

SEQ ID NO: 197 - DNA, 253 bp, Zea mays
  misc_feature: Incyte ID No: 700156530H1
  unsure 135: a, t, c, g, or other
atcaagggccagatctacgacgtcacccagagcagaatgttctatggacctggcggaccttacgccctgttcgccggcaaagatgccagcagagctctagcgaagatgtcgtttgagccacaggacctcaccggngacgttcgggctaagcccgtttgagtcgacggccctgcaggactgggagtacaagttcatgagcaagtacgtgaaggtcggcacggtcaagaagagcgtccctgtggaaggcggcaca

SEQ ID NO: 198 - DNA, 257 bp, Zea mays
  misc_feature: Incyte ID No: 700156531H1
  unsure 10, 19, 99: a, t, c, g, or other
ggcggcgaantgggcgcantggcgcacacaggtaacgcgtgcggcggagttcgcttcgaagcacggctgctcctactacaaggaggtaatggagaagancaagcagtacgtcgttcagccccccaccgtcgagaagtgccaggagctctccaagcagctcttttacacccgcctcgcaagcctaccaggtcgctatgagtcattctggaaggagcttgattgtgtcaagcaggtatggaagaacaggaaggacctca

SEQ ID NO: 199 - DNA, 239 bp, Zea mays
  misc_feature: Incyte ID No: 700156537H1
  unsure 22, 51, 122, 149, 151-176, 185, 194: a, t, c, g, or other
ctccccacctttggtcaggcangctcaggcaaagggggcggccaacaaggncgagcgatggcgaccaaggtcatctgcttccttgtgctcgcatccctgctcctcgccgtcgcctttcccgngtctgctctgcggcagcaggtgaagangnnnnnnnnnnnnnnnnnnnnnnnnnncagtgttancggaagcgnaggcggcaacctgaatccctgggagtgctcgcccaagtgcgggtc

SEQ ID NO: 200 - DNA, 239 bp, Zea mays
  misc_feature: Incyte ID No: 700156539H1
gaggaatgtctgatgtcttttggagaaccctacatcatgagggtgtttctggattctacaagggaattctaccaaatctccttaaagtggtgcctgctgcaagtattacctatctagtttacgaggcgatgaagaaaaatttgtctcttgattaaattgtggagttgttggtgggaaaaacagccatcattattggcatggctgactgtagagataatgacgacacatgaattttactg

SEQ ID NO: 201 - DNA, 181 bp, Zea mays
  misc_feature: Incyte ID No: 700156540H1
aggctatcggttccccatccggcgcaggagccgtcaccgccgccaagctggcccacgtcctctcctttgccacctcctggggcgccgccctctgggccaccttcatcggcggcatcataatgttcaagaacctgccgaggcacatgttcggcaacttgcagagcaagatgttcccggccta

SEQ ID NO: 202 - DNA, 243 bp, Zea mays
  misc_feature: Incyte ID No: 700156541H1
ggcttcgcgctatgacatttgcttgcatgttgatttatgccttggtggctttgtgctgccttttgctcataagcttgggtaccctattcctccctttgatttttctgtcaagggtgttacatccatctcatctgatgttcataagtacggattagcaccaaaaggcacaagcattgtcctgtacagaaatcatgaaattagaaagcatcagtttgttgctgttactgagtggaccggtggcct

SEQ ID NO: 203 - DNA, 247 bp, Zea mays
  misc_feature: Incyte ID No: 700156542H1
  unsure 72, 152, 201, 207, 227, 232, 235, 237-238: a, t, c, g, or other
tgcttcgtcaggggatgcgacgcgtcggtgatgctgatggcgccgaacggggacgacgagagccacagcggncgcggacgccacgctgtcgccggacgccgtggacgccatcaacaaggcgaaggcggccgtggaggcgctccccgggtgcnccggcaaggtctcgtgcgcggacatccttcgccatggccgcacgtaacntcgtgntccctgttgggcggtccaanctagngtngnngtgggcttt

SEQ ID NO: 204 - DNA, 244 bp, Zea mays
  misc_feature: Incyte ID No: 700156543H1
  unsure 89, 191, 197: a, t, c, g, or other
cgacatgtcgtctccgccgccgccggtgaagctgatcggcttcttcggcagcccgtacgcgttccggcggaggcggcgctgtgcctganagcgtgccgtacgagctgatcctggaggacctgttcggcagcaagagcgagctcctgctccaccacaaccccgtgcacaagaaggtgccgtgctcctccacngcgacngcagggccatctccgagtccctcgtcatcgccgagtacgtcgacgag

SEQ ID NO: 205 - DNA, 250 bp, Zea mays
  misc_feature: Incyte ID No: 700156547H1
gaagaaaccttattgaatgatgagaacttcaagagaaaagctcatgttattagaggtcttagagaactaacaaaggatgttcttcactattataagggtgatatcttagatgaactacctggcttagtagacttcagtgtgtttttgaagctcacacccaaacagaaagacattatttataagttggaagcacatgatcggttcaaaagaaatgcagtagggagtgcactgtacattcatccatgtcttt

SEQ ID NO: 206 - DNA, 251 bp, Zea mays
  misc_feature: Incyte ID No: 700156548H1
  unsure 243: a, t, c, g, or other
caacttgctcgagatgttcctttctctgctatatgctggtcaactcttgagcctatgcgaagaaaactacttggttttgttggagaagaaggcaatgcaggtagtgtattgggagtgaattttgctgctggttttgtagcaggcagtcttgctgctggtgctacatgccctctggatgttgcaaaaacaaggagacaaatagagaaggatactgagaaggcaatgaggatgactacaaggcanacattagc

SEQ ID NO: 207 - DNA, 265 bp, Zea mays
  misc_feature: Incyte ID No: 700156549H1
tgattttcttcccagttgtgaatgaggcatgcagggttatggatgaaaatgttgtaattcgagcttccgatcttgatattgcttctgttcttggaatgggctttcccaaaaacaggggtggtcttgtcttctgggctgacactgttggagcgccttacatacattcgaagctaagcaagtgggccgaaatgtatggtcccttcttcaaaccttcatcgtatttggaacaacgagctaaaagtggtgtaccattgagcgcaccagg

SEQ ID NO: 208 - DNA, 182 bp, Zea mays
  misc_feature: Incyte ID No: 700156550H1
  unsure 135, 144, 157, 163, 167, 177-178: a, t, c, g, or other
ggtgcgtgttgcaagctagacaaggggcccgacttccctattcccgacgagatcttcgccgaccatcccgatgacctccagctgtacaggagtatgatcggctctgatggatggtgcataataacgaccaaggcnacccgaacntgcaacatctacnaagacngacnttccttctgnngggt

SEQ ID NO: 209 - DNA, 264 bp, Zea mays
  misc_feature: Incyte ID No: 700156551H1
cgcttctgtaattctcaggcatccggaagaaatggccaagtcgaagaaccacacggcgcacaaccagtcgttcaaggcgcacaagaacggcattaagaaacccaagcgccaccgccagacctccaccaaggggatggaccccaagttcctgaggaacctgaggtattctaggaagggcaacaaaaagagtggtgaggctgaagctgaggagtaggaaggaaagcatggctttgtttcctctgtttttagtcagttccactttag

SEQ ID NO: 210 - DNA, 99 bp, Zea mays
  misc_feature: Incyte ID No: 700156552H1
  unsure 12, 22, 33, 52, 56, 60-61, 83, 89, 94: a, t, c, g, or other
aagcaccacacntcttcttctncttcctcctcntcctagcacagctagcgcntgcncccnntcgcctgtgatgatggtcttgnagcagnggcangtgcg

SEQ ID NO: 211 - DNA, 93 bp, Zea mays
  misc_feature: Incyte ID No: 700156555H1
gaaggaaccgaggaatggaaacttcttccggtttatgatcatactgccatcgtgctgtaagcggaagggacacaagtatgctcataaaccgga

SEQ ID NO: 212 - DNA, 260 bp, Zea mays
  misc_feature: Incyte ID No: 700156556H1
  unsure 158, 191, 201, 207, 251: a, t, c, g, or other
aaaaaaaaccgtgaccaactcgcagccggcctctccgcctccggctcttccctcctcctcgagcgttttcggcaccgcagttcggtacgatggcagcggcggccccgacgagggcagaggtgctgtcgcttttccggtccttactccgcacggcgaanagttctcggactacaacatccgcgagtacacangcgacgcgcnggaaangccttccgcgaaaacaggccctctccgacgcgccgtccgccgcngccttgttt

SEQ ID NO: 213 - DNA, 200 bp, Zea mays
  misc_feature: Incyte ID No: 700156557H1
atatatgctagacttttgagttgccttgttttgggaagaaacttggaattttcagtttgatgcacttgtattattattaggccttggtagcaacaagatacggatgtcgtctctacgtttgctgttgtacttcagtgtaacttgcctcccgaatgtatgagtattatttatcaagtcccaaataacagtgacggattgct

SEQ ID NO: 214 - DNA, 264 bp, Zea mays
  misc_feature: Incyte ID No: 700156558H1
  unsure 228, 233-234, 239, 242: a, t, c, g, or other
agcaattcaagcagctctagcagtggctcaggatcatcttctagtggctcagacagtgatagctcctcttcagatggatctgatgctggcaattcatcttgagatataggttcagaagttctgtcgagtaggcaataactgcctatttgacgcgacaatagcaccataagattgtacatgcttaccttgtctggcttagggaacccctgtagtttaagtaggttttgnaggcnnattcnccngctgatgaaggcagtaacttgt

SEQ ID NO: 215 - DNA, 237 bp, Zea mays
  misc_feature: Incyte ID No: 700156563H1
  unsure 132, 185: a, t, c, g, or other
agcacagctagcgcctgctccccttcgcctgtgatcatgtcttgcagcagcggcaagtgcgactgtggctccagctgctcctgcggcagtcatgcaactgcatgtcccctaacgtggagaccgccgccgcancagcatcaagaccacggtcctcgccgcgccgaccaccaaggccagcgccggcngcttcgaggcggcaccgagggcggcgctgcgactgcaacacctgcaatgcgg

SEQ ID NO: 216 - DNA, 95 bp, Zea mays
  misc_feature: Incyte ID No: 700156565H1
accgtgtggtgatgcgccgcaacgccgtctacgttaccttcgtcgtcgccggcgctttcgcgggcgagcgggcggtggactacggcgttcacaag

SEQ ID NO: 217 - DNA, 259 bp, Zea mays
  misc_feature: Incyte ID No: 700156566H1
caagaatagtaggactaacaggccccatcagtgcagtaagacagatagctcaggagtaccgtgttttctttaaaagagtagaggaagttggtcaggactatcttatagaaagctctcacaatatgtacttgctagatccatgcttggagacagtaaggtgccttggaagtgagtacgaggcatcagaccttgctgaggctataacaacagaggttcagaaagcatctgcctcatcaacaaattagtctagcggtatggc

SEQ ID NO: 218 - DNA, 256 bp, Zea mays
  misc_feature: Incyte ID No: 700156567H1
  unsure 130-152: a, t, c, g, or other
ccaaatcgccccccttcccaaaccctcttcttccccctcacgtgctcgacccagatcgagggctcgatccgtcggccatggcgctggagtgggtggttctgggctacgcggcgggcgcggaggcgatcannnnnnnnnnnnnnnnnnnnnnngggctcgacggcctgcgccggggcatgatctccgtggtgcggacgcgctgaagcccatgatgtcggtagtgcccttctgcctcttcctgctcatggacatctac

SEQ ID NO: 219 - DNA, 237 bp, Zea mays
  misc_feature: Incyte ID No: 700156571H1
gaaagagtagcaggtcagatgttaaactgttgcaagaacaagtttcggcgacagggattttggcctgttggcacatcagaaaccatttccttcgggccctgctaacaggtgagaaacttttagccgcctcggatactactaatcttttgttatgcacaagaattctcatctagcctgtataaatacaagaacaatgacttgtacagttccgcaattgcgcagaggaacagactgccg

SEQ ID NO: 220 - DNA, 259 bp, Zea mays
  misc_feature: Incyte ID No: 700156574H1
cccaaatgtgactttctgaactttgcaaagaatatcaaatgtttgcgctgcgatggagaattccaagagaggtatcagttgttgcatgaagaccgagagcatctgcctctcaaaaagggtgactggatatgcaaaaggtgcaactttttgaattttgctaagaatacaagatgcttgcaatgtcatgagaaaccaacaaaccgttactcaacccaggagagtgggagtgtgtctcgtgtaactatgtgaacttcaagag

SEQ ID NO: 221 - DNA, 261 bp, Zea mays
  misc_feature: Incyte ID No: 700156575H1
gagactttatcaaggtttatgctaacgggcagaggaaaatttcatgtgatcctgaaacaaaggagcttattaagagaacccttgacattgggcatgtgacctatgaagtccaagtccaactgcctcaggtcagatttttagacatatgggaaccagctgttctagcaataaagagggaaggttacagcattaaatgtaatgggcagcgtggtgttctaatcacagagaagtttcagcaaggaactgctattcatattccat

SEQ ID NO: 222 - DNA, 262 bp, Zea mays
  misc_feature: Incyte ID No: 700156576H1
gcaatctggataagtctccgaatatatttagcaaccgagcattcaaaaaacaggcgattagttgattcaaatagaccacaaaaacagcaatcagtcccacctctccagtttctattttttaaatttcctttcgataggattctatttcttatgatcaaccaaaggaaaatctttattttctgagggatcctaactttccaaagaaatctgtaaggaccattagccaattcacttctaatttgagagcataatgattaacagg

SEQ ID NO: 223 - DNA, 199 bp, Zea mays
  misc_feature: Incyte ID No: 700156577H1
  unsure 63, 114: a, t, c, g, or other
agacggggctcgcccagaaaccggttgtgctgtacccttcgccggggatgggccacctggtcnccatgatcgagcttggcaagatcctcggcgcgcggggatgtccgtaataantgtcgtcgtcgagcctcccttcaacacgggcgctacggcgctttcctcgccggcgtctccgcggccaacccgtccattccttccg

SEQ ID NO: 224 - DNA, 268 bp, Zea mays
  misc_feature: Incyte ID No: 700156580H1
  unsure 232, 264: a, t, c, g, or other
ctccattaatattggcagcaagctaggatcatcagcatctgagcttattattactaaatcgatcggttgccatggcggggatgagagtcggcaagctggcgctggctgcggtgctgctgtgcgcggcggcggccatggccacggcgcacaggcctccggcgtgcgcgccacctacaacttctacaacccgcagcagaacaactgggacctcaacgccgtgacgcgtactgcngacgtgggacgcccataagccgtgtcgtggcncatg

SEQ ID NO: 225 - DNA, 254 bp, Zea mays
  misc_feature: Incyte ID No: 700156582H1
  unsure 132, 138: a, t, c, g, or other
tgctcagttgcagattttagagttgcttgacaatgctattttcactgccggctacaaagctgtgttgcatattcactctgttgtcgaagagtgtgagattgttgagctcatagaggaaattggcatgaaganaaaganagaagaagatccaaagaagaaaaagccaaagaggaagcctctttttgtgaagaacggtgcaattgttgtttgccgcattcaggtgaataacttgatatgcatagagaagttctctg

SEQ ID NO: 226 - DNA, 250 bp, Zea mays
  misc_feature: Incyte ID No: 700156584H1
  unsure 236: a, t, c, g, or other
aaaggacacataaggaagaagttcatatctgttagtgggataatgtattaatgtacgaagacacttcattgtcaatgcatggatttttaccaaatcaaatatggcatagagatatgcagagtaaaatgctggttgcttcatgtataggaaaatgtttaattggctcaagaagctaagcaagatgaggaagagaatcagaattaatttccttaccagtcagtccagcagttaatccncagagcgaaccatt

SEQ ID NO: 227 - DNA, 246 bp, Zea mays
  misc_feature: Incyte ID No: 700156586H1
  unsure 234: a, t, c, g, or other
gaaagtgaaggctgcactaaatagacaatctaaaactcgattgattgggccaaattgccctggtatcattaagcctggtgagtgtaaaattggaatcatgccaggttacatccacaagcctgggcgtattgggattgtatctcgttctggtaccttgacatatgaagcggtgtttcaaacaacagctgtaagcttggggcagtcaacttgtgtaagcatggtggtgacccatcnatggcacaattt

SEQ ID NO: 228 - DNA, 251 bp, Zea mays
  misc_feature: Incyte ID No: 700156587H1
cctaagtgtagcacttttcccctgtttttttttctggaaaattcacgatcctttttctcaaacaagcaagagagttgtgtgtctttatattaaaaagatgaaaaggggcgtaaaaaacccctaacaaaagaaaacaacccaagcatgataactctcttatctgtagttctgtaccatatgaaaccaaacataactgatacagctcaacaggaccttggaggtgtagcatgcactcatccgtcgagataaaa

SEQ ID NO: 229 - DNA, 253 bp, Zea mays
  misc_feature: Incyte ID No: 700156590H1
  unsure 251: a, t, c, g, or other
aaatcaaagagtcatatagccaaataaagactgggagcattgatgcagctgtccttgttcattcatatgataatgaaaggtctggtggacatcagaagacaagactatcagcaattaatgttcctcctatgggtcttctttacccaagggttcttgttccagaagagtaccctccacctcctcgatcttggttccaagactatgatgacatgctggaggatacctggcaaacaagtgatggtctttacccnag

SEQ ID NO: 230 - DNA, 216 bp, Zea mays
  misc_feature: Incyte ID No: 700156591H1
  unsure 132: a, t, c, g, or other
tacatttgatatgtataccatattacccgttttatagaataaagagagctcagtctgtacattatgtagcatattactgtgttgcctataaatccaagctttactgttgaatggtgaacaatggtaacacantcctgctggatggaaaccagtggtatgtataatacccactttgtaagaaaagtctaaaaagaaaaattatattactttgtaaaa

SEQ ID NO: 231 - DNA, 143 bp, Zea mays
  misc_feature: Incyte ID No: 700156592H1
gtttggaacgagagagatgtatctctgctttgcttattggagttgtaacagatccaactacatgatcaaattcgtgtatgcatcagtctgccagtcctgtgtggctgtgtccgtggatcgttatgtcagattagtttctgatg

SEQ ID NO: 232 - DNA, 259 bp, Zea mays
  misc_feature: Incyte ID No: 700156593H1
  unsure 11, 81, 87, 199: a, t, c, g, or other
cattctcatcnccgacccccgcaccgcagcgtaaaccctagtccccggcggcgaccttgcggcctccgctgcgctctgacnggtgcncgtttagacgaggagctgcggcggccaagaccaatcgaccatggctacccgtatccagtttgagaacaactgtgaaattggtgttttctccaagctgacaaatgcttactgnctggtagcgattggagggtcagagaacttctacagtgcctttgaggctgagcttgcagat

SEQ ID NO: 233 - DNA, 142 bp, Zea mays
  misc_feature: Incyte ID No: 700156595H1
  unsure 139: a, t, c, g, or other
gcaccattgtccatgtaccttctggatccacagacacaatctcaacagggaagattgcttgctgctcttgctcttggtgatcttttccaaaacgaaggtcttgctcgttctactgatgctgttgcagcatgccgcgctnaag

SEQ ID NO: 234 - DNA, 138 bp, Zea mays
  misc_feature: Incyte ID No: 700156596H1
  unsure 24, 31, 52, 95, 118, 137: a, t, c, g, or other
ttttcctttcccctttgtagctancatggcnataacaatgagaccatcaaanagctgtgcatttaagtatggaaatactcccgtctgtgtctgtnataaggacgtttcatgtggctgnaacctgccaattctgttant

SEQ ID NO: 235 - DNA, 252 bp, Zea mays
  misc_feature: Incyte ID No: 700156603H1
ggctatggggatcggtcaaggcgcttgcccgaggctatgagatcatcatgggcttgctgttgttcaccccgatcgcattcctcgcttggttcccgtttgtttcggagttccagacaaggatgctgttcaaccaggccttcagtagaggtctgcagatttctcgtatcctaggcggacacaagaaagaccgggctgcacggaacaaggagtgagtagccgagcagcgtgagcctggtagtgctgacctacata

SEQ ID NO: 236 - DNA, 252 bp, Zea mays
  misc_feature: Incyte ID No: 700156605H1
gctacagatcgtagatactgctcagttttggtctagagtttagacctcagatcagatgcatagatcattatattcgttgtagctgtataggagaacaagaagttgtttgatgtgtgcgatttgtagtttgtctaaatacgttttggtcgatgtggtgtgtattggtgtttgaatatatgtggctgtgatgattcatttatgtgttacgaggatggttcgtggatggtattaatcgtttgttaaaatacttcg

SEQ ID NO: 237 - DNA, 217 bp, Zea mays
  misc_feature: Incyte ID No: 700156608H1
  unsure 59, 154, 177, 198, 213: a, t, c, g, or other
agcacagctagcgcctgctccccttcgcctgtgatcatgtcttgcagcagcggcaagtncgactgtggctccagctgctcctgcggcagctcatgcaactgcatgtcccctaacgtggagaccgccgccgccagcagcatcaagaccacggtcntcgccgcgccgaccaccaaggcnagcgccggcggcttcgaggcngccaccgagggcggnggct

SEQ ID NO: 238 - DNA, 133 bp, Zea mays
  misc_feature: Incyte ID No: 700156611H1
tcaggatttgttctaagttaatcctaaggaaaaaatggtgcttcttggtgctgcaaaatggttgtgctcatctgaaaagctacttactctcgctttgagtgcgaataaggcaaaggttgccagtttttcaaac

SEQ ID NO: 239 - DNA, 255 bp, Zea mays
  misc_feature: Incyte ID No: 700156612H1
cccgcggggagctctagttccgccaagcgtgcgtaccggcgtccggatccgggaccgaagatgaacggagtccctggtgcggaacaagccggggatggccagcatcaaggagatgccggtggtgcaggacgggccgccgccgggcggtttcgcgcccgtgcgcttcgcccgccggatccccacctcggggcccagcgccaccgccatcttcctcaccaccttcggtgctttcgcatatggcatgtaccaggtcgg

SEQ ID NO: 240 - DNA, 69 bp, Zea mays
  misc_feature: Incyte ID No: 700156613H1
  unsure 47, 50-51, 56, 60, 66-68: a, t, c, g, or other
ggtgtttgttggaagagtcaattcattcgtgaagcattatgaaaaanaannaaaangaanacaaannna

SEQ ID NO: 241 - DNA, 251 bp, Zea mays
  misc_feature: Incyte ID No: 700156617H1
gctatgtatatgtctcaaggtgctatattctttacgtcctatgagtttctcagtacattaatgtttcctgaacccgaacaagaggttcatgcgaggagcgtttgatcgtgaaatgagaagatggcacagcaaaatacagaactcggggatagtctgacatgtgatgtgaggggtttgaatccaattttgggtgttgtttacaaagttgtctgttaggaataggatagcattcatacatatttttcggtaat

SEQ ID NO: 242 - DNA, 248 bp, Zea mays
  misc_feature: Incyte ID No: 700156618H1
atcaaatgtcccattacaggcaaaacgttcatccaagaaacccgcagcacgggcaaaggttccttttgagaaaggctatagtcaaatggattggctaaaactgacacaaacacatcctgatctagctgggcttaaggggcagtcaaaccgaagttaatttctttggaagaggttaagcagcacaaagcaggagattgtatttggacagttctcaaaggccgcgtgtacaacattgctccatacatgaa

SEQ ID NO: 243 - DNA, 247 bp, Zea mays
  misc_feature: Incyte ID No: 700156621H1
tgcagatcatttggctcaaataattggtagtccaacggtcacgatacttgttttggtttgggatttctgtggatgcttttgtctagctttatctatgttgtggttgcttttacatgtggttgtagggtaagtttggcaatcaaaaatccctgtagcgaagaactgatatttaaaactgggggcaggtcagaaatcattccgactgtttggttggagcacgccgttgtgccactgcacgcgtggagtt

SEQ ID NO: 244 - DNA, 191 bp, Zea mays
  misc_feature: Incyte ID No: 700156623H1
  unsure 5, 20, 30, 36, 47, 53, 57, 63, 71, 80, 99, 101: a, t, c, g, or other
cgccncttctcactccgccncgccggagcncgccgntgcggcgcgcntgcgcncggncacacncgaggggnctatggacncggtggctccccgcctgantngctcctcgacgcgatacgggcccatcagcagcagtgctgcctccttcagtgggcccgtccggaagtggcgcaaggcctgggtgcccctca

SEQ ID NO: 245 - DNA, 248 bp, Zea mays
  misc_feature: Incyte ID No: 700156624H1
gtggactgcgcacgggaggcgatgaggctgatccacgcggaagacaagaacctcaaggccgaggactcagcgtgggagctgaagaagaagttcggcaacggcgtgagcaccatggtcctcgtctacaacgccaccggggccagcctgagcctggtggacgacgggaaagactggatgggctccgtctacagctcgccgatcccggacaccttccacaacgggcagtggatcgccttcctccacgtcaa

SEQ ID NO: 246 - DNA, 250 bp, Zea mays
  misc_feature: Incyte ID No: 700156625H1
gcgggatcaaggagccagagagcgggacgcagcgagcgttccgccggagatcgagaccgtagctagggtttgaggcgccgggctgcggtggacgagatgtcgacgccggcgaggaagcggctgatgcgggacttcaggcgcctgcagcaggacccgcccgccgggatcagcggcgcgccgcaacgacaacaacatcatgctctggaacgccgtcatattcgggccggatgatacgccgtgggacggtggc

SEQ ID NO: 247 - DNA, 250 bp, Zea mays
  misc_feature: Incyte ID No: 700156626H1
accagccgctaacaaactataaccaggatgcataccgtcttcagttgaagttgtttctctatgaagtaaagcagcaacagttgctttctgggattcggagttatctgaagctatattcaacaataaccattagcaaacttgcccaatatatggaagtggatgaagcaacactaaggtcgatcctgatgacatacaagcacaaaatgcatgcagttgacagtgaaggaaagatagtatcaagtgcagactt

SEQ ID NO: 248 - DNA, 79 bp, Zea mays
  misc_feature: Incyte ID No: 700156627H1
agaaaagctccgtgacgcatgggtcgtcacgttgtcaccttctcaggtgattcgagcacctctgagcttcgatcttttt

SEQ ID NO: 249 - DNA, 250 bp, Zea mays
  misc_feature: Incyte ID No: 700156628H1
gccttcctggagatgatcaaggaggaattcaacaggagatattcaggtggcgaacagggaacggctacagccaacagtctcacccgagatttcgggcccaggcttagagaccagatgcagtactgcacggatcacccagaggaggtgagcaagctgtccagagtgaaggcccaggtggatcaggtgaaaagcatcatgatggaaaacatcgacaaggcctttgatcgcggacagcagatcgacgggcttg

SEQ ID NO: 250 - DNA, 251 bp, Zea mays
  misc_feature: Incyte ID No: 700156629H1
  unsure 16, 24, 94, 115, 124, 145, 151, 158, 172, 208, 237, 240: a, t, c, g, or other
ctgacctctgatcgtnattaccanccactgccagcgacctctcctcggaggcgtgaccgtaattgcttccgcaactaccccgataccattcccnaatcctccgtcgacccctctncaccggcgntcggcggcgaacgatggggtnggcgangcgggtnctgcggcgggtttnttctttgctgcgggcgtcctcttcgtcccagaggcnatcggttccccatccggcgcaggagccgncancgccgccaaag

SEQ ID NO: 251 - DNA, 251 bp, Zea mays
  misc_feature: Incyte ID No: 700156630H1
actttggagaggtgtatacaattcagcagtactaatattatcacagttatttttcatgccttcaattttttcttgcaacattattttcaaactattaggggcagcttgatagatccacctggaaaaactcatactcaatgtcatgatatttgtctttgtattggttctttgtgaggggttatatataatttgagaaatttcaagatgtgatgattacccggagtcagcaaaaaaggtactgttttcaggag

SEQ ID NO: 252 - DNA, 254 bp, Zea mays
  misc_feature: Incyte ID No: 700156631H1
ggcattgttgaagttgcaaagataatttatggagtgcatgacgaagcgaaggacaaagcttttgagttggagttgagctggatctgtgatgaatcgaaccgtcagcatcagaaggttccaaatgaactgttggagcaggccaaagctgctgctcaggcagctcttgaggagatggatgctgactaagaaacaggacgatttgcccagacttggtgtttttggtgctgttgaaatctccgatccctttggggtga

SEQ ID NO: 253 - DNA, 145 bp, Zea mays
  misc_feature: Incyte ID No: 700156632H1
  unsure 124, 129-130, 135, 141, 144: a, t, c, g, or other
gccggagcgttccaatgtgttacgatatcttgtaagtgctattgcttttgtaagacatttggcaattggcgtattaaataaatgcttgaactgaataagattagaattatttttttgtcaaaanaaaannaaaanaaaaanagng

SEQ ID NO: 254 - DNA, 241 bp, Zea mays
  misc_feature: Incyte ID No: 700156636H1
gaaatactgattggacatttccaactgtaaaggatcaaagtcaggtgctgatttcacatgcaaagtcgagtaagagcaatccaattgcaaggtggcacatctgtcaaggtgcaatcaatgacatttccttttcaccggatggtgcttacttggcaactgttgggcgtgatggccatttaagagtatttgactttgctaaagaacaactaatatttggtgggaaaagttactacggtgcact

SEQ ID NO: 255 - DNA, 118 bp, Zea mays
  misc_feature: Incyte ID No: 700156637H1
gcgggaggagcatgaatggaaaaggattttcctagaggctgggttcagcgattacagaatcacgccgacagcgctgggtttccaatcggtcatcgaggtcttcccctgaggaagaagc

SEQ ID NO: 256 - DNA, 241 bp, Zea mays
  misc_feature: Incyte ID No: 700156639H1
gcacctacgcaactacctgaacctcccgtctgagatcgtgcctgccacgctcaagaagtctgccaagccacctggccgcccatttggctctggccctcctggtgaccgcccaaggggcccaggccgttttgacggcgacaggccaaggtttggtgacagggatgggtaccgtggtggtcctcgtggtgctcctggtgactttggtggcgataagagtggagctcctgctgagttccagcca

SEQ ID NO: 257 - DNA, 241 bp, Zea mays
  misc_feature: Incyte ID No: 700156640H1
  unsure 38, 64, 66, 73, 168, 170, 175, 179, 188, 193, 196, 200-204, 206, 208,215, 218, 222, 224, 228, 231: a, t, c, g, or other
ccaatcgccgagaaggggaagccaaatcgatggcggcngcggcggccggcgccgcgcgcgcggncncgcttancgccccgcacctcgcttcatttcgtgtcgccaagatgaacgaagcgcactaagaaggcaggaattgttggcaaatatggaaccaggtatggtgcnancttgngtanccaaatcangagantgnaggnnnnncncnttcccantantttncngatnctngggaatttcg

SEQ ID NO: 258 - DNA, 246 bp, Zea mays
  misc_feature: Incyte ID No: 700156646H1
  unsure 126, 197: a, t, c, g, or other
gattgaagcttcagaggcgaagttttcaacaagattttaccagcacaagaagttctggtgtgcgtgatctacgtgagaagctatctggtataatgaacccacagccatcaaatgctgacccaccanagccaaagccaaagccagtatcggaggttgttaacatctcaaggcgtcaaattgctgatgaaatgcatgcncgccaaaataagaaaccaccaaagcagacttcatcgaagaagacatctc

SEQ ID NO: 259 - DNA, 247 bp, Zea mays
  misc_feature: Incyte ID No: 700156647H1
  unsure 237, 244: a, t, c, g, or other
taggtttttgattttagccgccgccgctgctcatctcacatccctcgagaagacgcctgctcctcgccgatcgatacgatggccgtcttctccgacctccacaccgccgacggcctcaagtccctcgaggctcacctcgccggcaaaacctatgtgtctggtgactccattactaaggatgacattaaggtcttcgccgcggtgccgtcgaagcctggcgctgagtttcctaatgcngcccgtngta

SEQ ID NO: 260 - DNA, 188 bp, Zea mays
  misc_feature: Incyte ID No: 700156648H1
  unsure 80, 91, 95: a, t, c, g, or other
cccaaagggggcgcgcgggggggcgtctgggccggccaggggcggtccacgacgcgggagagagaaaaaagagagagagnaagaaaaaganaaanaaaagaaaaaaaaggtttttctccctttcgaaatccgatctttctaaatgaatgcacttacatccctaagcaaatcaatgtatgcatagttcg

SEQ ID NO: 261 - DNA, 284 bp, Zea mays
  misc_feature: Incyte ID No: 700156649H1
  unsure 2, 203, 222, 229-232, 234, 239, 241, 251, 260, 266, 280, 282: a, t, c, g, or other
anggcgtttgccgaaaaacatggatggaattatgtggttcggaaacgccatgcacctcttctgaggcctaaggcctacgctgagaacttcaagtggagaggccctccgaaagcggagcaagcatgagctcgagacatctgtgatgctgacattggcacgatgtcgttttcctcctggctcgattttattttgctttcaaccgngcccattgtaaagtacganctaaggnnnncntctancnaactggtaanaagcctgtnggcaancaaacaaattggtntntt

SEQ ID NO: 262 - DNA, 282 bp, Zea mays
  misc_feature: Incyte ID No: 700156651H1
  unsure 195, 200, 206, 218, 229, 235, 241, 245, 248, 252, 262, 280: a, t, c, g, or other
gggttacgcgaaggcgaacggagtagtggaagcagaggcggcagccatggccgtgatggagaagctcaagatctttgtcgttaaggagcccgtagtcgcggcctcctgcctcatcgctggattcggtctctttcttccagcagttgtccggccaatcctggattcatggcagaccgcggaacaagttcctccacntcttnaaaatnatgggttcacanggtccccgggnaaaaanaaaggnagtnaanttgnttgtttcccnagggcaaatgtcccccantt

SEQ ID NO: 263 - DNA, 277 bp, Zea mays
  misc_feature: Incyte ID No: 700156652H1
  unsure 205, 227, 233, 235, 242, 244, 246, 252: a, t, c, g, or other
gtctggactatggagaagggtgcatcagagagctccagcccactacgcccttaggttctgtgcatatattgttgtatctcttaactgtttgatgatatggaatattcttttcccaatatggtaccgagcctttcttgagcctcctcctcgctgccgctcttcttcggaatgccgcggcatttgccctcccctcatgtttggcganccggttgcagtaacagcacganagtgantnccaaggnanangaaatnggggagaggtttaacttggggaccc

SEQ ID NO: 264 - DNA, 161 bp, Zea mays
  misc_feature: Incyte ID No: 700156658H1
  unsure 27, 31, 57, 97, 111, 113, 124, 131, 133-134, 143, 145: a, t, c, g, or other
gcacttcatccgctgggacaccccgcncaancagcacccgctctacctcaccgccanggactaccgccggatgctgctcagcggggccgccttctcncgcaagttcagggncngcgaccccgtnctggacngnntcgacaggnanatcctccgctgttgtt

SEQ ID NO: 265 - DNA, 112 bp, Zea mays
  misc_feature: Incyte ID No: 700156659H1
aaagaaataacagtcagggatggtttgtttgccatgtgatcttgtacactcctacttaaattatggctgctgcacggtgctgctagcttgtactaataaagtgttgatctgc

SEQ ID NO: 266 - DNA, 279 bp, Zea mays
  misc_feature: Incyte ID No: 700156661H1
  unsure 15, 36, 80, 82, 94, 121, 149, 152, 156, 159, 162, 165, 174, 182-184,190, 195, 199, 204, 209, 219, 222-223, 235, 242, 257, 263, 267: a, t, c, g, or other
ggcagcagcacaagnaagaaccacacctcctccctntcgcctgtgatcatgtcgtcttgctgcggcggcaagtgcgggtncngctccagctgcncctgcggcagcggatgcaacggctgcngtatgtaccctgacgtggagaccgcagncancagnagngtnaanaccacggtnctcgacgnnncgatcnccaanggcnagccncggcngcttcgaggnggnnaacgaggacggnggctgcnactgcaacacctgcnaatgcngcancagctgggcttt

SEQ ID NO: 267 - DNA, 127 bp, Zea mays
  misc_feature: Incyte ID No: 700156663H1
agacaatacaagtgtattctagttgtctttttcatagtgggtcagtgaaaaaaagtgttttgaaccattgttccttgacccatatgttcgacgcacacaatttgccaagaactatctgcacatatgg

SEQ ID NO: 268 - DNA, 280 bp, Zea mays
  misc_feature: Incyte ID No: 700156664H1
agcgcaggaagaagcagcagacgcaggagctggagcacccgcactgctacgttgacacgttgctcgatctcaggctcgacgagggacgacaagacggtggccgccgtcctctcacagaccacgagatagctagtctgtgcatcgagatcctcatcgttggctcagatctacctgggacggcgctggagtggaccatggcggactagtaaagaacccaggcgtgcaggacaagctctacgaggagatgatgaaagccaaaggcatggtggtgttgttgctg

SEQ ID NO: 269 - DNA, 210 bp, Zea mays
  misc_feature: Incyte ID No: 700156665H1
  unsure 103, 143, 193, 195, 202, 209: a, t, c, g, or other
atcttgagctcctgtaggtagaaagaaacgatgtcgggagtgtgggtgttcgaggacgggatcgtgcggcgtgcggacagcgagccgcccagcggcgccggcnccggcgggttcgcggccgaacaaggtgcttggtgcacgtnccgaacggggaggtggtgacgtcgtaccaaatgctggaacggcggctccnanaacttcnctgaaanc

SEQ ID NO: 270 - DNA, 80 bp, Zea mays
  misc_feature: Incyte ID No: 700156667H1
  unsure 32, 57, 62, 67-70, 73, 75: a, t, c, g, or other
ggaacagttttgcctgtgtttggttacatganatatctgtttcacaaaaaaaaaacnaaaanaaaannnnacncnagagg

SEQ ID NO: 271 - DNA, 269 bp, Zea mays
  misc_feature: Incyte ID No: 700156669H1
cgatcaacacgggccgcgtcgtcgggacctacgggtacatggcgcccgagttcgcgttggacggcgtcttctcggtgaagtcggacgtgttcagcttcggggtcctcctgctggagatcttgagcgggcaacggaacggcgctttgtacctcgaggaacaccagcagtccctcatccaagacgcatggaagctgtggagtgaagaccgcgcggccgagttcatggacaagtcgctggggcgtcctatccaaggacgaggcgtggcgtgt

SEQ ID NO: 272 - DNA, 209 bp, Zea mays
  misc_feature: Incyte ID No: 700156670H1
  unsure 76, 100, 108, 119, 130, 143, 153, 155, 160, 167, 169, 179, 196, 204,206, 208: a, t, c, g, or other
catttcctcgatcatggcgaaggcgcaggcgcaggtggcggcgaggttcatgatggaggcgccgccgccgcaggtngtgtcggtcatgcggcggaggaangcgccgangagcctgatcnccatcgccgangacgacaagtganatgctgggcncngtggnttcaacntngtaccaaggnagaggggggttttgggntggttttngngnt

SEQ ID NO: 273 - DNA, 264 bp, Zea mays
  misc_feature: Incyte ID No: 700156671H1
  unsure 166, 182, 207, 211, 216, 225, 227-228, 240, 244, 247, 250-252, 258: a, t, c, g, or other
atcctgctgcctaagccatcatcccaagtgcttggtaaagatatgatgtcccttgtatcgctgctagtcagcactgagtcgtttgaggtgctcgtggtgatgttaggtactagatgggtgtcattacttatgaatgcgatgttgctgtgacagaactgcatttccnattgtactatggttgnccaagttgtcattaccaggatgggnggtngcctnagtggttgnannaaccatgatgcntttnggnagnnncccggngggggg

SEQ ID NO: 274 - DNA, 267 bp, Zea mays
  misc_feature: Incyte ID No: 700156672H1
  unsure 94, 103, 157-158, 162, 169, 174, 201-203, 217, 233-234, 240, 244-245,247, 256, 265: a, t, c, g, or other
cacaccttggcttcaaacacataccttgttgggcatgctgttactctagctgacattgtaatgacatgcaacctctaccatggaattgcacggntcttgtacnaagaccttcacgtctgatttccctcatgtcgagaggtatttctggaccatggtnnaccngcctaanttcangaaggtcattggtgaggtcaagcaggnnnagtctgcacctttnttcaaaaaagggcggnncttagngggnncnagaggtagnggttgtgangg

SEQ ID NO: 275 - DNA, 204 bp, Zea mays
  misc_feature: Incyte ID No: 700156675H1
  unsure 69, 114, 139-140, 151, 159, 162, 174, 178, 181, 202: a, t, c, g, or other
caaaaagaagcacataaaagtttcttcaaacatgctatgaaatttggtatcttattgttaaaccttgcnttacctgctagtgtttatgcgcaaaattagaacttactgcctaangtttatgattttaagattataatanntttgtcaatangtgccaanatnaggtaacgttcntccngantcagcgagtgtcgaagcctgngg

SEQ ID NO: 276 - DNA, 203 bp, Zea mays
  misc_feature: Incyte ID No: 700156676H1
  unsure 117, 146, 151, 153, 183, 186, 188, 201: a, t, c, g, or other
cgctcccttttattcagcgattcaaaggcaagacggtggtggtcaagtacggcggtgcggcgatgaagtccccggagctgcaggcgtccgtgatccgcgatctcgtgctgctctccngcgtcggcctccgccccgtgcttgttcanggcgncngtccggagattaattcctggctgtggcgtnggntngagccgaagttcngt

SEQ ID NO: 277 - DNA, 271 bp, Zea mays
  misc_feature: Incyte ID No: 700156677H1
  unsure 214, 255: a, t, c, g, or other
gcagagcaacgagtatggcgccgtcgcctactccgacctgggaggcttcaagtacctcgtctacgccaacggcctctgcgccgcctactcgctggtatccgcgttctacactgccgtgccgaggcctgccaccgtgtcgcgctcctggctcgtcttcctcctcgaccaggtgttcacgtacctgatcctggcggcgggcgcacggcggcggaantgctgtactcgcctacaacggtgacaaggaagtgagtagantgaagcttgcggcgtt

SEQ ID NO: 278 - DNA, 275 bp, Zea mays
  misc_feature: Incyte ID No: 700156680H1
  unsure 218, 241, 266: a, t, c, g, or other
gacttctcgccgcagtggtgggacctcatcaccaccactgcctggttccgcgaccactggtcccgcgagcgcgcccacctggacgagatggccgagcagatcgacgcggccggcctcctccacgacgacgaggacctcttctacgacgaccagctcgagcagggccccgtcgccgccgcccttaagacagattcggtgctcaaggcgctgaacatganctccccgaaggcggcggcgagcnccgcgggggttccgggagaaaccangaacgccga

SEQ ID NO: 279 - DNA, 209 bp, Zea mays
  misc_feature: Incyte ID No: 700156681H1
  unsure 177, 183, 199: a, t, c, g, or other
ggccgatccggcggaggagaacgttgtctcgccgccaccgacccctgcggccccagccgtgggcgcctcagactcgcccctgcagcctgttgctgacggcgcctcaacggagaaggtgtctgccccggcgccggaggtaaggtcccggggattcaggcttcttggagaggacattcngtgcanaatcccttggggcggnaaaatgctga

SEQ ID NO: 280 - DNA, 201 bp, Zea mays
  misc_feature: Incyte ID No: 700156683H1
  unsure 191: a, t, c, g, or other
acaattacaagctagacacaatgccaagatatatcggcaaaaagaagactcgagaagaccgggcacgagaggcctcctatctcagtaatgagaatgagaagtacaagaaagctaaagactatgtgaacatgctgaaggactggtacggcaatggagcgtcgaagctgtgcgtgatctacaaccagacgggnggaaccctgg

SEQ ID NO: 281 - DNA, 264 bp, Zea mays
  misc_feature: Incyte ID No: 700156684H1
  unsure 177, 182, 197, 242, 245, 259: a, t, c, g, or other
atcagatcaggagaatacggtgctactgcttatgtgacattcaaggagcgctttgccttggaaactgcggtattgctcagtggggctactattgtggatcagccggtatgcataacttattggggacaacctgaggagacttttaatttctgggacaggccaacttgggaggttgangaggnaattgaatacacganttatcaatcatgccagtacaacactactccgcagaagctcttacngtngctcaagatatcgngaaga

SEQ ID NO: 282 - DNA, 198 bp, Zea mays
  misc_feature: Incyte ID No: 700156686H1
gaaaaagattggacactacaacatgaaatgcagatggagtcctggctgccttgagagtatgatgcataacagtgatagcttcagtgcggagtctgctataattgaaactgatgttttcatggagaaatcaaccccgacagtgaagtttgagattcagctttacaaaacgagggatgagaagtaccttcttgacctgaa

SEQ ID NO: 283 - DNA, 195 bp, Zea mays
  misc_feature: Incyte ID No: 700156687H1
  unsure 174: a, t, c, g, or other
gtggaggtggaggcaactttactgctggaggtagcgacactttgccaacagtaactttggttctgacagtagttttggtggaaacggtgctggtggctttgatgcaaccggcggttccacaggcgatgatgggttctctggcacacctgatgataactttggtggtaacaagantgaagaaaccatggttttatc

SEQ ID NO: 284 - DNA, 198 bp, Zea mays
  misc_feature: Incyte ID No: 700156690H1
  unsure 169, 188, 197: a, t, c, g, or other
cacaccattcgctctctcgctccactctctctctcgccgagtgagggaaggagggagagagaggaggcagggaagtggggagagcggcgaggacatggcggcgaaagcgagcagagcagccgcctccggcgcggcctacgaggagcagcgcaagaagcgggtcctcganaacctcaagcatctggagntttggttana

SEQ ID NO: 285 - DNA, 259 bp, Zea mays
  misc_feature: Incyte ID No: 700156691H1
  unsure 71: a, t, c, g, or other
aggggatcgaagcggagagcaagggagcggtcgagcgggtgacatcatcgtcatccagggtttctcaatangcagcgatggcgaccagggcggcggcgaggttcctgcagcgcagtttctgtcttctggcggtaaggtcctcagcgaggaggagaaggccgccgagaacgtgtacatcaagaaagtggaacaagagaagctggagaagctcgcacgcaagggccccagctcaggagagcaacctctcaccacagctttg

SEQ ID NO: 286 - DNA, 82 bp, Zea mays
  misc_feature: Incyte ID No: 700156694H1
  unsure 57: a, t, c, g, or other
ggtagccatatattcagtggcttgtgtattctattcgctactaaggggactgctgtngtaattgatttattcgttttgcctt

SEQ ID NO: 287 - DNA, 269 bp, Zea mays
  misc_feature: Incyte ID No: 700156695H1
  unsure 26, 29, 189, 193, 202, 211, 213, 234, 251: a, t, c, g, or other
attttccctcatctcccgccgcctgnacncaacaagcctctcgacgctagtcatggccgcttccaacggcgccgccgcggtcgacgagaccgtcgccgccaccgactccgtgcaggagcctccccagaagatctccaagatctctcccctgctcaaggtgaagaagctctccgagaaggccgtgctgcngtcncgcggctcngctctcgcngnggctacgacctctcgagtgcngaggagatggtggtgcnggcgcgtggcaaggcgtt

SEQ ID NO: 288 - DNA, 177 bp, Zea mays
  misc_feature: Incyte ID No: 700156701H1
  unsure 104, 134, 158, 176: a, t, c, g, or other
atttatggaactgatggaccgcaaacccttgtttcctggaagagaccatgtccatcagctacgtcttctaatggagctcattggcacgccaaatgaggggtggnatcttgattttgtaaatgaaaatgcaagangatatatccgccaacttcctcgtnaccctagacagtcttacnt

SEQ ID NO: 289 - DNA, 86 bp, Zea mays
  misc_feature: Incyte ID No: 700156702H1
  unsure 69: a, t, c, g, or other
cagcactggcgccgcaccaagctcggcttctgagcgcgcggatcggccggctctgcgtcggaattctanggtctctaactttcctt

SEQ ID NO: 290 - DNA, 252 bp, Zea mays
  misc_feature: Incyte ID No: 700156703H1
  unsure 2, 56, 62, 97-98, 104-105, 111, 114, 127, 148, 240, 242: a, t, c, g, or other
antcctcagcttcacaaacaaaagctcctgctgccgcagaaacagctgtccccgcnattaanggaggtgcagctccaggccgggtggtaacgaaacnncttcgnnaacccnatnagaaccgattaanggcactcctgctccgtctgcngttgctgttaacaagaggaagagggatgacggcaagcccaaggcggtctccaaggaggaggaagcggccctcaaagcgcgggaagcagcaangnagagagtgga

SEQ ID NO: 291 - DNA, 249 bp, Zea mays
  misc_feature: Incyte ID No: 700156705H1
  unsure 104: a, t, c, g, or other
cccggttctccctcgctccagatctcccttcgcagccggccagggaccccttcacagcgcgggagatggctgatcaggaggccccagttgcagttgaaggggcnaccaaccccagttcttggagagccaatggacttgatgactgcgctgcagctggtgatgaagaagtcaagtgctcatgatggacttgtgaagggtcttcgcgaggctgccaaggccattgagaagcatgctgctcagctttgcgtt

SEQ ID NO: 292 - DNA, 173 bp, Zea mays
  misc_feature: Incyte ID No: 700156706H1
gaagttcctcagtgctctcgcagcttaaggagcaaacagcaacactttacttcgttttttatactttattatagccgcactgtttattactcgggctatcattttgtgaacagcgactgtaatatttttttactctatattcgtagtgagatgaaatcctgtgtgggcaacaa

SEQ ID NO: 293 - DNA, 233 bp, Zea mays
  misc_feature: Incyte ID No: 700156708H1
  unsure 97, 208-209, 225: a, t, c, g, or other
taatggatcacagagagcagcatcaacttcggctcctgtgagaaaagtggcatcagccacaagttttggtgatgatctgtctgacttatttggagcntccctggcatcttctgatgtttttcaagaagttgagggagaaagtgaagaaagaagacgtgctaggttagaacgtcatcagaggactcgtgaacgagcggcaaaagctctnnctgagaagatgaacgngatatgcc

SEQ ID NO: 294 - DNA, 247 bp, Zea mays
  misc_feature: Incyte ID No: 700156709H1
  unsure 97, 104: a, t, c, g, or other
gggagcggtcgagcgggtgacatcatcgtcatccagggtttctcaatcggcagcgatggcgaccagggcggcggcgaggttcctgcagcgcagtttncttgttncttctggcggtaaggtcctcagcgaggaggagaaggccgccgagaacgtgtacatcaagaaagtggaacaagagaagctggagaagctcgcacgcaagggccccagctcaggagagcaaccctcgtcaaccacaggctctgca

SEQ ID NO: 295 - DNA, 248 bp, Zea mays
  misc_feature: Incyte ID No: 700156710H1
  unsure 50, 96, 103: a, t, c, g, or other
ggtggcacctcgcgtgggacgagtggacggcggcgtacccggccaccagnttctacgtcggcctcacggcgtcggagatgacgcacggctgggtgngactccncatagatacgtctactacgacgtcgcgccgtccgcgcagaaggcggacaactacggcggcttcatgatctgggaccgctactacgacaaactctccaactacaccagcatggtcaaggactacgcttgattggatttctcgactc

SEQ ID NO: 296 - DNA, 239 bp, Zea mays
  misc_feature: Incyte ID No: 700156711H1
  unsure 91-92, 94, 96: a, t, c, g, or other
ccctcgcccgctcagtcacaaagcctcagatctcagtcgcctgcgccgccgcttcgttcgtgtggaggggagaagacaggaaatggccggnngnanctgagggtcgtgctcttggggatgggcaaccccctcctcgacatctccgccgtcgtcgatgacgccttcctgacaaagtatgacatcaagctgaacaatgctattctcgctgaggagaagcacttgcctatgtatgacgagtt

SEQ ID NO: 297 - DNA, 246 bp, Zea mays
  misc_feature: Incyte ID No: 700156712H1
  unsure 97, 99-100, 102: a, t, c, g, or other
gccaatagcattggtggagaacagtggaaggtgcaagactaatgagcatggggagaagatacttccggacggaactctgtgggttccaaacctgatngnnanagaaattactgttgtcatctcaaacgggagcagtcccactcatgttgatcagaagttaattgatggtccaaaccctaacaatcgccgaaagttgttcataccacttatccttgctgtggagtacttcttggtggtaaaaggaat

SEQ ID NO: 298 - DNA, 250 bp, Zea mays
  misc_feature: Incyte ID No: 700156715H1
  unsure 100, 104, 249: a, t, c, g, or other
gcggcttcgaatcgctcaagcgtctgggtcacatctcacccgctgtgcagtcccacctcaaacatgtgtacctcaccctatgctccgcgctggccttctncttngcacttcgggcgcgtacctccacatcctcctcaacgtcggaggcgccctcacgaccgtgggatgcgtggcctccatcgccttcctcatctccctgcccgcttcacgggaccaggagaggaaccgcttggcgctgctcatgttgcng

SEQ ID NO: 299 - DNA, 244 bp, Zea mays
  misc_feature: Incyte ID No: 700156717H1
  unsure 99, 101-102, 120, 143: a, t, c, g, or other
cctcctctccccagcacccggagctcgaccgaacgccgctcaccatgatcatccccaagaagaaccgcaatgagatctgcaagtacctcttcaaggggngnnggcgtgctgtatgccaanaaggactacaacctggcgaaganccgcagatcgatgtgcccaacctccaggtgatcaagctcatgcagagtttaagtccaaggagtatgttagggagacttctctggcagtatactatggtatc

SEQ ID NO: 300 - DNA, 246 bp, Zea mays
  misc_feature: Incyte ID No: 700156718H1
  unsure 98: a, t, c, g, or other
gctagcatggcaagttcgcgctgctttgagaacccgccggtgctggagccggccagcggaggaggcgaggtcgttgacgacttcggcgggcaggaagnggcctacgtcagcggctccgctgggtccaaggccgccgtcgtcctcatctccgacgccttcgggttcgaagcgccaaacctgaggaagatagccgacaaagttgcttcgctcggttacttcgttgtggtgcccgatttcctgcatggg

SEQ ID NO: 301 - DNA, 248 bp, Zea mays
  misc_feature: Incyte ID No: 700156719H1
ctctagggtttttgattttagccgccgccgctgctcatctcacatccctcgagaagacgcctgctcctcgccgatcgatacgatggccgtctctgctgcgcggaccttccacaccgccgacggcctcaagtccctcgaggctcacctcgccggcaaaacctatgtgtctggtgactccattactaaggatgacattaaggtcttcgccgcggtgccgtcgaagcctggcgctgagtttcctaatgccg

SEQ ID NO: 302 - DNA, 166 bp, Zea mays
  misc_feature: Incyte ID No: 700156720H1
  unsure 15, 18, 23, 27: a, t, c, g, or other
cagcattgatcttancancgtangaanaagtttattgggcagatggcatgcttatagctgatttgtctcaacaaaatactagtgctgcagaagttggggctcactgaaatcacgatccagtggcaaagtgttggaaagcatcacaatcaggatagtgcgtccaaag

SEQ ID NO: 303 - DNA, 235 bp, Zea mays
  misc_feature: Incyte ID No: 700156721H1
  unsure 11, 74, 78, 97, 105, 108, 116, 121, 154, 186, 213: a, t, c, g, or other
gtcactgacancaacggtaactacaaaggacctctcacactttcactaaagcaagggtccttactagtgatgcntggnaacagtgccgacatgtgtngttgtatnatntggtgtgnccgtngtccaaccggcgcgtgagcatcacgttcgcaanggtgaggccatcgacgccggtggacatgagcncactcccgtcccccaccaaggccatgncaccctggcagccgcagccggt

SEQ ID NO: 304 - DNA, 242 bp, Zea mays
  misc_feature: Incyte ID No: 700156722H1
  unsure 96, 106: a, t, c, g, or other
cagaggaggagctacctacctaccttttgatgcaggttgccatggccaccaccaccagcagcagcttggtcaccggcttgaggtgcaggacagggntggtcagcantggcattgatcagacccactagtgccgctggggatcgccggggctggaggacgacggcgtccggccgtggagcccgcagggcaaggtcacggtcgctgcggcctgcaagacatgcaaaggaaagggggcagtagaa

SEQ ID NO: 305 - DNA, 238 bp, Zea mays
  misc_feature: Incyte ID No: 700156723H1
  unsure 94, 96-97, 100, 228-229: a, t, c, g, or other
ctccattttttcatctcattcggcgccgcggcaccccctgctcgtcactcgcgatggcccggatcaaggtgcacgagctgcgcggaaagagcanannaancgggattctggcaagtcgcacttcaaggagcttaaatcggagctctccctcctacgcgtcgccaaggtcaccggcggggctcccaacaagctctccaaaatcaagattgtgcgcacctccatcgctcnngtgctcacc

SEQ ID NO: 306 - DNA, 240 bp, Zea mays
  misc_feature: Incyte ID No: 700156725H1
  unsure 100, 128, 130: a, t, c, g, or other
gcggcgcatcatgaccgtccccttcttcaccaacaaggtggtggcccagaaccgcgccgggtgggaggaggaggcccggctggtggtggaggatcgttgnaggaaggaccccgaggccgcggccggcngngtcgtgctccgccgccgcctccagctgatgatgtacaacgacatgttccgcatcatgttcgaccgccggttcgacagcgagcacgacccgctcttcaacaagtcaagcgc

SEQ ID NO: 307 - DNA, 231 bp, Zea mays
  misc_feature: Incyte ID No: 700156727H1
  unsure 95, 98, 102: a, t, c, g, or other
agcatcatcgatcgccgagcgtgcgtgctctagctctagcaatagcagcgaggagacggtcgaggatggatcagaacaacagcaacaggcagtcncgncagncaggcgccgccgccaccacccgcgggctacccgacggcaggcgcggacagcagggaggcagcggcaggaagcagggacgccgggggaagacgacctcgcgcggggagaagggcttcatcgaaggatgca

SEQ ID NO: 308 - DNA, 239 bp, Zea mays
  misc_feature: Incyte ID No: 700156730H1
  unsure 93, 96, 98: a, t, c, g, or other
gggtcatagtaggttttttgtagaattttatgcaggaatggcttgatactcgttccaccttcctgaaattaaatttgatgcgcacaataatanaangnctcactgaaattttaactggcaaagcatgcacggatgcgaaacatttgaatatctggttcttgtatgcgcctgccctgactcttgatatggttactatctctctgcagccgtttggtcaggtccactctgcaggatggtga

SEQ ID NO: 309 - DNA, 242 bp, Zea mays
  misc_feature: Incyte ID No: 700156733H1
ccaagcagtgtggaaaaaatcatggaaattgatgagcacataggctgtgccatgagtgggcttattgctgatgctagaacactagtcggaggcgatggctcgtgttgaaactcagaatcataggttctcatacggggagccaatgaccgtagaatcttcaacacaagctatttgtgacttagctctgcgctttggcgaaggtgacgaagagtcaatgtcacggccattggagtctctctcct

SEQ ID NO: 310 - DNA, 228 bp, Zea mays
  misc_feature: Incyte ID No: 700156735H1
  unsure 85, 93-94, 99, 109, 131, 135, 168, 220, 225: a, t, c, g, or other
ccatcccctccaatggcggcgactgccacgtccttcgccactctcgccgtcgcgcgctcggcagggcagcggttcctccttgcantccaaagnnttcgnttccttcgcngctcctctccctccgcggcgcncgcntcccctcgcagggcgtctccttatctgggggcntcgcggcgtcgccctctcatagccgcgcgcgcttcgccacatcagccagcgngaacnaag

SEQ ID NO: 311 - DNA, 201 bp, Zea mays
  misc_feature: Incyte ID No: 700156736H1
  unsure 94, 127-150: a, t, c, g, or other
agcgagttatcgcgctgtaaaattacactgtgcttgcgcgctgaataattttgctggctttgtcgttttggttttttgaacgttgtcggcccgnagggctatgtagccaggactgttcgtcttgtannnnnnnnnnnnnnnnnnnnnnnngcggactttgggaatccttttatatgaataaaagctacagtcctgttctac

SEQ ID NO: 312 - DNA, 240 bp, Zea mays
  misc_feature: Incyte ID No: 700156737H1
  unsure 89, 94: a, t, c, g, or other
cctcctcaacctccagcccaacctccagcccggaatcgagagcaatggcgctcgccaaggccaaggagatcgttgcctccgctcccctncggtncgtctttcagcaaaacttcctgtcctttctgcgtccgtgtgaagcagttgttcgagaagctcggagcaagctacaaggccattgagttggataaggaaagtgatggagctgagctccagaatgccctgaaggagtggactggacag

SEQ ID NO: 313 - DNA, 75 bp, Zea mays
  misc_feature: Incyte ID No: 700156739H1
  unsure 51-52, 54, 62, 66-68: a, t, c, g, or other
cagacagcaagaaactgtccagcttattgtcttgttcctcgcgtcttgacnnangtagcttnaaannnaggggtg

SEQ ID NO: 314 - DNA, 172 bp, Zea mays
  misc_feature: Incyte ID No: 700156740H1
  unsure 52: a, t, c, g, or other
ggaacttgtgatgctctggctccttgtgccattgctgagggacatccttagnctttatttagtggtatggtttggtactttgttctggtgcattcactcgtttatctatccctaatacatgccgccatgtttgtacttccaatgacgcgccgatcatttgctttgttttgtc

SEQ ID NO: 315 - DNA, 235 bp, Zea mays
  misc_feature: Incyte ID No: 700156741H1
ctaagatgtgtttttctgtgtgatgcgtctcattggacgggtgttagctgctgcatctggacgcctaaatgagaactaagttatttaagtttggctgggggtaattctaattttcggtggtgcacagggaccattgtaaagtaaagaggttaacattatatatcatccttaaataggaaaagggcaaacaagtgtttgttgaagctgtagctcaaacagtccctacttattccat

SEQ ID NO: 316 - DNA, 240 bp, Zea mays
  misc_feature: Incyte ID No: 700156743H1
  unsure 88, 99: a, t, c, g, or other
ctctgcacgtgcactagagcatcttcatgaaatttgttctccatctataattcacaagaactttaagtcgtccaatattttactggancatcccggagnctcaatgcctgcacatttctgatgctggacattcaagttttgttccagatgctgaattccaggcttcagatcaggggtctgggtatagtgcccctgaggtcgagatgtccggtcagtataccctcaagagtgatgtctaca

SEQ ID NO: 317 - DNA, 238 bp, Zea mays
  misc_feature: Incyte ID No: 700156744H1
  unsure 88, 92, 96: a, t, c, g, or other
ccgactgctaccgcacgccggaccccgtccacggcaaacggaaccgcacctacatggacgtcgtccgctcatgcctcgggcctagagnttgntggntggtgtgtgggactcgcacagtacgcgatcctctgggggacaatggtgggctacaccatcaccactgccacgagcatcatggccgtcgcgcgcacggactgccgccaccacaggggccacgacgcggcctgcgcctcgtcgg

SEQ ID NO: 318 - DNA, 75 bp, Zea mays
  misc_feature: Incyte ID No: 700156747H1
  unsure 57, 62, 70, 73: a, t, c, g, or other
ctttcatgacatgcatccttcatgttcttagtgcatgcttctttaagaaaagaaganatgancataaatngtncc

SEQ ID NO: 319 - DNA, 229 bp, Zea mays
  misc_feature: Incyte ID No: 700156748H1
  unsure 89: a, t, c, g, or other
gcgtgtgcttggtgtgtgcagaggctggtgatcaagacgaagagcgtggagttcatgccgttcctgctctccctggccgtgttcctgtncggggtcacctcctggttcatctacggcctcctcggccgcgaccccttcattattatcccgaacgggtgcgggagttcctgggcctgatgcagctcatcctgtacgccatctaccggaaaaacaagggccccgccgcgcc

SEQ ID NO: 320 - DNA, 268 bp, Zea mays
  misc_feature: Incyte ID No: 700156749H1
  unsure 75, 198: a, t, c, g, or other
atttccgacgcttcaagcagcgatcgcgaccgctgcaaacgaagccctggagcgattccgggaggacgggcgcanacggcgcttcgtctggtggacatggaggctgcgtacgtgacggtggagttcttccggaagctccctcaggatcctcctgctgatgcgcctgctagcaaggctggaggcaagccttcagcggancggcggctgcgcgcctcctgaccgtacggtgacgggcattcaggagcatcgcctccaacgtgtcccagta

SEQ ID NO: 321 - DNA, 271 bp, Zea mays
  misc_feature: Incyte ID No: 700156751H1
  unsure 240, 243, 268: a, t, c, g, or other
gaaagaaaccgttatgaagtgatagacatgtcatataaagctttactggctttagcatgttctagtcatatatcagtgatttgctatcggtctgttgatggttatattctgtctgaagttttcacttctactcctgaacttgtgctgctaagctgttgacacaactattgcttgctttcactgtggctggaagcattgtggaaatagaagttccgctgatatctgcctgacctggatggnggnaatagatgccaaccagagggggcangcc

SEQ ID NO: 322 - DNA, 180 bp, Zea mays
  misc_feature: Incyte ID No: 700156753H1
agaaaattgctttcattcttgagcaggtccggctatgcctggatcggcaagattttgtcagagcacaaattttatccaggaaaatcagtactagagtatttcacgcagatccatcaaaggaaaaaaagaaaccaaaggaaggtgacagtattgttcaggatgctcctgcagatattcctt

SEQ ID NO: 323 - DNA, 179 bp, Zea mays
  misc_feature: Incyte ID No: 700156754H1
  unsure 148-149, 167: a, t, c, g, or other
cacacattggacttgcactggtgcttgctcataattactagttcatcagcaaacaacaaacaatggcaccgaggctagcgtgcctcctagctctggccatggcagccatcgtcgtggcgccgtgcacggcccagaactcgccgcaggnntacgtggacccgcacaangggggggcgccg

SEQ ID NO: 324 - DNA, 190 bp, Zea mays
  misc_feature: Incyte ID No: 700156755H1
  unsure 117, 122, 139, 141, 148, 151, 158, 161, 167, 169, 172, 179, 189: a, t, c, g, or other
cgcgggtgagccggggaccaagaaaaagcgtggccggccaagaaagtacggccccgacggctccatgtcgctggcattggtgcccgcatccatggctggggagccggcgccggcggntcttngagcttccggtcctttntngcctaanggngcccagnggnggacantncgncgttaanttgtcggggng

SEQ ID NO: 325 - DNA, 270 bp, Zea mays
  misc_feature: Incyte ID No: 700156756H1
  unsure 60, 121, 134, 145, 170, 175, 197, 207, 215, 259, 269: a, t, c, g, or other
gcggcctccctttttttctccagttcctccggcggcggcgtgcttggcggtgcgccaggngcccagatctccaccatcttagtcgccggcgacgagcatcaccaggttcccgatgaccatngcgcacgcatgangtgcctgcttnggcggtccattgggtttaaagcgcngcagnacagagagccctgagtaaccantgccggaacnacggcggnaaggttccggccgtggctgaagctaacggcgaaagaaggcgaanaggaggaagna

SEQ ID NO: 326 - DNA, 265 bp, Zea mays
  misc_feature: Incyte ID No: 700156758H1
  unsure 215, 220, 223-224, 226, 230: a, t, c, g, or other
aaccactactccatcccttcctccgcgtccgcggaggccgtcgcggacaacctgtggaacgcgttcctcggcggcggcaacagcgacgtgccccgccccttcggtgacgcggcggtcaacggcatcgacttctacatcgacgaccacagcgcaccgggcgaccactacgacgagctcgcgcgccgtctcgactacttcaacagcatgtactaacnccacncgnngnatangtacggctgacggcgacgcgcggtgcgcgttcccg

SEQ ID NO: 327 - DNA, 265 bp, Zea mays
  misc_feature: Incyte ID No: 700156759H1
ggatgaaagaagttaaaataaagtcgaaatttttgaaatgaagctctctaaataagcccttaattgcaaagtttattgtcgtgttggctttggagagcttcttaatttcaaagagttggatttaaaaaatcatttatacgttacgtctgattatttaacatatttgaatctggttgttttgattcacatgaaatctctcttcgcaagcaaacagaactaacatgagactgtattttcttttttcttcttacatgaaagtgtattg

SEQ ID NO: 328 - DNA, 267 bp, Zea mays
  misc_feature: Incyte ID No: 700156760H1
gcaggaggcggacaaggtaagcagcaatcgcaggaaccctagcgccgccgcacccgcaggaatgggtatcgacctcgtcgccggtgggaggaataagaagaccaagcgcactgcgcccaagtctgacgatgtctacctcaagctcctcgtcaagctctaccgtttcttggtcaggaggaccaagagcaatttcaacgctgtcattctcaagaggcttttcatgagtaaaaccaaccgaccaccaatctccatgcgccgccttgtcaa

SEQ ID NO: 329 - DNA, 267 bp, Zea mays
  misc_feature: Incyte ID No: 700156761H1
  unsure 216: a, t, c, g, or other
gcgggcagcagcacacagccccatcccaatcctagtcgatcttcttcccctcctcaaggaagaaaagaagctgaaccatggggaagagaaagtcagctgctaagccacctcctaagaagcggatggacaagcttgacactgtcttttcctgcccattctgcaaccacgggagtagtgttgagtgccgaattgacatgaagaatctgattggcgaanatcttgtagaatctgtcaggaaaacttcagcacaactgttaatgcactcac

SEQ ID NO: 330 - DNA, 266 bp, Zea mays
  misc_feature: Incyte ID No: 700156762H1
ggcggggatggcgtactcgttggagaggctctgctccggcgtccacaccctgaggtagagctgctgcccgaggtactgccggtcccacatcgccgaccgcagttccacatcccctggttgtccagcgacaccaggatcgccgaccacccgttggggtacacctgaacggtgtgtcttgcctgcgcgtccaccaaattgtacgtctgccgctgcgtctcattccactggccatcgccgcccacgcgtccgcccacgcgtccgcccac

SEQ ID NO: 331 - DNA, 267 bp, Zea mays
  misc_feature: Incyte ID No: 700156763H1
gcttaacagcacatgaagttctatgccatccatggattcgtgatcatggagtagctcctgaccgtccactggatccagctgtcttatctcgcattaagcaattctctgcaatgaataagttgaagaaaatggctttacgagtaatagctgagagcctatcagaagaggaaattgcggggttgaaggaaatgttccagatcatggacactgacaacagtggcgcaatcacttatgatgagctaaaagaaggattgagaaaatatggct

SEQ ID NO: 332 - DNA, 270 bp, Zea mays
  misc_feature: Incyte ID No: 700156764H1
gtttgtcaggagtaaaaaaagccaaagtttctcttggtcatctagtttgtgaaaatgacatggacgaggaagaggagtgatttcgagcagccttgaccttgaggatgcaatagaagtgcacttagatggttccacttccacctgcacctgtgtgttttgttatgctagtcttagtctgtacggcgatcttgaatgtaaagacaagtacaaagttgaatgtcagttctcatgtgttgcatgaatgaaaattctaagggcttgtttggtagg

SEQ ID NO: 333 - DNA, 261 bp, Zea mays
  misc_feature: Incyte ID No: 700156765H1
  unsure 7, 70, 111, 154, 181, 193, 206, 209, 217, 251, 259: a, t, c, g, or other
cggacgntggattcacggcttcaccttcgcaacttctagaagcttctttctaggctacctccctcaccgntaccatgggcaacggcctctccccttgtctgtgccccaganccgagcgcggcgagacggcgcggctggtgttctggggtgggtnggcgaggatggccgacgagcggctgtncatcaccgccgngacgtcacggcgnagntctccgancagcactcgtctggccgcggactcttcttcatcngcctgcgntc

SEQ ID NO: 334 - DNA, 63 bp, Zea mays
  misc_feature: Incyte ID No: 700156766H1
aactaaaggtgtaccatacttgaaccagaaatgaaaatgaataacccggagttcgtttggttt

SEQ ID NO: 335 - DNA, 260 bp, Zea mays
  misc_feature: Incyte ID No: 700156767H1
  unsure 217, 230: a, t, c, g, or other
cttctccgacgcatcttcggcgtcgttaaagctggagcaggctctacgctccgatgtactcatccctgctccacaccggctcagctgcgtccaggcaatctctatttcatcatggattatcttcttcaggacaccatcacaactcttgttccactgcattgttgccctttcatgacttgttgaatgtttgaaggtgggttgaccttcgcttatgggncagggagatgcgnagatgccaaaactcttgcagagctcggatt

SEQ ID NO: 336 - DNA, 257 bp, Zea mays
  misc_feature: Incyte ID No: 700156768H1
  unsure 215, 240, 244, 246: a, t, c, g, or other
acacctcttcctcctcttcctcctcctagcacagctagcgcctgctccccttcgtctgtgatcatgtcttgcagcagcggcaagtgcaactgcggctccagctgctcctgcggcagtcatgcaactgcatgtcccctgacgtggagaccgccgccgccagcagcatcaagaccatggtcctcgctgcgccgaccaccaaggccagcgccggcggnttcgaggcggccaccgagggcggtntgcnanaaaaatttaat

SEQ ID NO: 337 - DNA, 196 bp, Zea mays
  misc_feature: Incyte ID No: 700156769H1
  unsure 188-189: a, t, c, g, or other
ttctgactcaggtagatggctacaaaactgtattcaagccagacaatgagaggagtattctggaggtgccaacaaaggatgacttgctgttttctcaccggataccctctttccagctgacaacagagaagggtggcgagctctgtggcttctacgagctggatcctgctgcaatcccggatcctccnnctggggg

SEQ ID NO: 338 - DNA, 199 bp, Zea mays
  misc_feature: Incyte ID No: 700156771H1
  unsure 164, 173, 176, 182: a, t, c, g, or other
cgccactctcactccgccacgccggagcacgccgctgcggcgcgcctgcgcccgccacacacgaggggactatggacacggtggctccccgcctgagtcgctcctcgacgcgatacgggcccatcagcagcagtgctgcctccttcagtgggcccgtccggaantggcgcaangcntgggtncccctcaccggcaccgg

SEQ ID NO: 339 - DNA, 80 bp, Zea mays
  misc_feature: Incyte ID No: 700156772H1
  unsure 9: a, t, c, g, or other
gtctttttngggggttctttgttgttttgagcatggggacacgtgcaggaatcatgtcttgatatctttttacgcaaccc

SEQ ID NO: 340 - DNA, 197 bp, Zea mays
  misc_feature: Incyte ID No: 700156774H1
cagatggataagctgcctaatacatgtggtttgtctgggaattgaaattctggaacgcgagccagccaatccgcaattgcacggtcagaatatctggccgtgctgcccccgttgaagtctgcggcaacctcacacacaccatcaagtgcgcttgagcctcaagtcccaacatagttgtaacttgtaacatgaataca

SEQ ID NO: 341 - DNA, 260 bp, Zea mays
  misc_feature: Incyte ID No: 700156775H1
ctatgatactgctatctatctatgatactactatgatactgctcctaattcttggagcttgagctggagctgtactaaacaggccctatgttaggtgcattgacaacaatggtgacagtttgctgttgggctttaggttctggagtctttacttggagacaactttgttccaaatgacacagagcttcacgccgatggtgagtactgccagattgtcacaggacctaacatgggaggaaagagttgctacattcgccaag

SEQ ID NO: 342 - DNA, 260 bp, Zea mays
  misc_feature: Incyte ID No: 700156776H1
agagaatgctttttcaaaaataggggaagcactagatcacttgaatagccgcggtactggctctggttcaagtatacttggcataagacggatacctcccgattcaggacagtcaaatgcatcttatcatgacgactgcacagcggcccctgcagcaaacagcagttcaaggttgccgaacggctgtgattcggaagctcaatttcccaaagagttgatatcatcctgcgttgctatgatgcttatgataaagaactgca

SEQ ID NO: 343 - DNA, 260 bp, Zea mays
  misc_feature: Incyte ID No: 700156777H1
tctcgctcgctctccccgtctcccgcacgcccacccgccgccgccgttcgccatgggcctcctcgactcgctctaccgcgtggtgatgcgccgcaacgctgtctatgttaccttcgtcgtcgccggtgcttttgcgggcgagcgggctgtagactacggagttcacaagatctgggagatgaacaacctcgggaaaaggtacgaagacataccagttttggggcagaggccagccgaagaatgatatactttggtcgcca

SEQ ID NO: 344 - DNA, 260 bp, Zea mays
  misc_feature: Incyte ID No: 700156778H1
ataagctatagccatcttcttctctgaattccagtccaagggccggaataccgtcagagggagtgggagagggggggaaaaaagatggtgaagctcgcatttggaagctttcgcgactctttgagcgccgcgtcgctcaaggcctatgtggccgagttcattgccacgctgctcttcgtgttcgccggcgtcgggtccgccattgcctactcgcaattgacgaaggcggcgctctggaccccgccggcctggtggccatc

SEQ ID NO: 345 - DNA, 261 bp, Zea mays
  misc_feature: Incyte ID No: 700156779H1
ctttaatttcagagctaattgaagaatttggtaatggtggcaaaggaaaaattaaggagtctgcttccacttccaagtctcaagcaacagcaactagcagtaggtgcctctccaaaggtatatatattttgttgtatgagcccataactgtttactggtatgactatgagcgcatgactgtttattgctatgagctgcactgtttacttatactccatccgtttctttttaattgtcgctggatagttcaattttgcacta

SEQ ID NO: 346 - DNA, 255 bp, Zea mays
  misc_feature: Incyte ID No: 700156782H1
cacctacctctctacgaactacctgccgccggaaaaccctagagcgctcgaccatggatccgcagcagccggagcctgtcagttacctctgcggagattgcggactgagaacaccctgaagcccggagatgtcatccagtgccgtgaatgtggctaccgcatcctctacaagaagcggacccgccggattgtccaatatgaagcgcgctgaagagtgaagacaagggaaaacatgaagatggttgatctattatc

SEQ ID NO: 347 - DNA, 81 bp, Zea mays
  misc_feature: Incyte ID No: 700156783H1
aaccacacaaattaagtgggcaaaacaccatgctgctagtggtgttacattgcattagccattagcccccccgcttgatcc

SEQ ID NO: 348 - DNA, 193 bp, Zea mays
  misc_feature: Incyte ID No: 700156784H1
  unsure 174, 183, 186: a, t, c, g, or other
tgataaaccaaaggagtccagtgaaaaaaatattgacgatttaattgatgaggacctgaaagaaataggggacaggaaaaagaggctctttgcaagcctcgagacaggctgcaatggatgcatattcattcaaatgcataaaagagcaggagaccctggtccagttgagattgnccaaacctngtncccctcc

SEQ ID NO: 349 - DNA, 250 bp, Zea mays
  misc_feature: Incyte ID No: 700156785H1
  unsure 197, 224, 231, 235, 239, 241-242: a, t, c, g, or other
agcacttgttccagctagctaggagagagagctttgtttaggcggcggcaagatgaacaggaagccaggagactgggactgcagggcgtgccagcacctcaacttcagccgtcgggatgcatgccagcgctgcagtgaaccacgtggagttggtgatcgtagcggcggtggtggcgacttgggtgggcgtggtggtncctccttcggcggtggtttggtgctgntctgatncccncctngnnatggacac

SEQ ID NO: 350 - DNA, 191 bp, Zea mays
  misc_feature: Incyte ID No: 700156786H1
  unsure 187: a, t, c, g, or other
caggaggatgagtgtggcatttgcctggagacctgcaccaagatggtccttccgaattgcaaccatgccatgtgcatcaactgttaccgagactggtacacaaggtcccagtcatgcccgttctgccgcgggagcctgaagagggtccggtccagagacctgtgggtgctcaccggcgacgacgacnttat

SEQ ID NO: 351 - DNA, 256 bp, Zea mays
  misc_feature: Incyte ID No: 700156788H1
ctctttcttccccacgaaaccagagcaaattccggcgagccggtgcggtgcggcggaggaggccgagggagacgccggcgcgagaaggagcatcaggaggaggcagcggagatggatccggactcggtgaagtcgacgctctctaacctggccttcggcaacgtcatcgccgccgccgcccgcgacctccaaaaagaaatggtggctaaagacaaggctcaagcagcacctgcaaagccatgatgaattgatcttg

SEQ ID NO: 352 - DNA, 254 bp, Zea mays
  misc_feature: Incyte ID No: 700156789H1
  unsure 244: a, t, c, g, or other
gcgcgagcgaaatcatgaagcttgaggtcatgcccaagcagcgggtgctggaggcggagcagagggaggaggccatggagatgagtggcctggacctgtggaagcacgagaagcccccaaggatctgccccttgcccccgtcgctcccggcgccgccagcgtgcgacgaggcggcgctcgtgccgccgctcaacttcgccatggtcgacgacggcatattccgtccggcttcccgaagaccgcnattttcggtt

SEQ ID NO: 353 - DNA, 147 bp, Zea mays
  misc_feature: Incyte ID No: 700156791H1
accgtgcccaaggacaacgaccgcaaggcctacggcaggcttatcaccatcaccaattaattagttattaatcatatatatgatgtcattatatatgtaagcggcatgtgtatcgttatcatcaccgaataaaaaaatgattatgcc

SEQ ID NO: 354 - DNA, 255 bp, Zea mays
  misc_feature: Incyte ID No: 700156792H1
atcatccttaggatccataattgacgcaccatcttcactgcacatttcaagacagctagaagaagcaagcaagactacagacatagcctctgtggtacttgttcgaaagagcttggcatggattacagggatcatcctgcttgtttcaactctcataggggtttgcttgcttatgaacatgccacttaccagggacaccctcctgtactcgaatgttaagatcgattagtttgaaggggtgttcgcggcagctac

SEQ ID NO: 355 - DNA, 257 bp, Zea mays
  misc_feature: Incyte ID No: 700156794H1
  unsure 247: a, t, c, g, or other
atctacctcaccttctacggcacctccagcagcgccgactacgacagcctcggctgcctcaggaagttcaacgacctgtccaccaaccacaacaaccagctgcaggcccagatctccggcctccaggccaagtacaagtcggcgcgcatcatgtacgccgacttctactccgccgtctacgacatggtcaagaatccaggcagctacgggttcagcacggcgttccagacgtgctgcgggtccggangcggcaagta

SEQ ID NO: 356 - DNA, 266 bp, Zea mays
  misc_feature: Incyte ID No: 700156801H1
  unsure 140: a, t, c, g, or other
agcaaattaaggacgctctgcacacgtactattcatcttccattgttggtttgctttgcttaccggcaaccatggccagcactcgtgcagcagcaactctccttttgctcctcgcgctcgccggcacctcgtcggcgcantgtccacgggcttctactcctactcgtgccccggcgtgtacggcgccgtcaagtcggtgatgcagtccgccatcgccagggagaagcgcatgggggctccatcctccgcctcttcttccacgactg

SEQ ID NO: 357 - DNA, 250 bp, Zea mays
  misc_feature: Incyte ID No: 700156804H1
ggaaggcacatgttaagaggcataggacatacctcacaaccctcctctactacctgtccattggattcagcagctccggactgtcgtacgtcgcaggcgtcctcctcacgaaggtcctagcacacttcggtatcattgatcagggtggtgcatcagctcctgctcctccaggtctctcattccctgaagcagccgcctgggcttcctactgagactggagccctcatttagtagttttgatggttaaatg

SEQ ID NO: 358 - DNA, 262 bp, Zea mays
  misc_feature: Incyte ID No: 700156806H1
  unsure 241: a, t, c, g, or other
ggagccctgcaagaatacctagaagaagtgtgagcagaagcccagtaagaggtggtcgacctcgcaggaacattagcagaagtcccagtccacatcgcagggtagtaacaccaccaaacaatggaagaagcccatccaggagtggttctcctgatgggtcaccaaaacgcataagacgtggacggggttttactcagaggtactcatacgcaagacaatatcgctcaccttctgctgatcntcacatcgttatggtggaaga

SEQ ID NO: 359 - DNA, 261 bp, Zea mays
  misc_feature: Incyte ID No: 700156807H1
gcctgttactaaactgacaccaatggcgatgagttccgtggccaccgcattccttgtttccagtaatctccgaaacgacgagtgttccatcattccgatttggcgtgtttttaactggcaatgttgatggccatccacaggtcatggactacgagtcacttccgcacttctgcaagagagaagggtcaggttcatccagcgactcgctggatggagtagattgctactcctacgaccaccctttccaccagcagctgtaca

SEQ ID NO: 360 - DNA, 262 bp, Zea mays
  misc_feature: Incyte ID No: 700156808H1
  unsure 81-95: a, t, c, g, or other
ctcggcctcctgcgacctccatggctggcaaagctgctgcagacactgggagcaacgaccgagtcgttgaggttgaggggnnnnnnnnnnnnnnnatggcggacgtgtacaaaggcgagctcacgccgctgcagaggcacgtctccttcttcgaccgcaacaaggacggcgtcatctacccctccgagacataccaagggttccgagctatcgggtgtggcgtcgccctgtctgctgctgctgccgtcttcgtcaaggtgga

SEQ ID NO: 361 - DNA, 263 bp, Zea mays
  misc_feature: Incyte ID No: 700156809H1
gcaatctatcatagattccgagcagatgaggcagaacatatctactaatgcaaatgctattggcaattttctagaggtgatgttttcagaagctgaacaagttctaaatgatgttctgaaatctacttcggatctcaaggaactattagccttttctgcagaactacaaaacactggattgagaaggaatcttgcttctgttcaagcaatgtcaaagcaatcaaatgatttctttgaagatataaggatacatgtgtctcagc

SEQ ID NO: 362 - DNA, 263 bp, Zea mays
  misc_feature: Incyte ID No: 700156811H1
cccacctggatacccgtctacaacggcaggacgagcgaggacagggtcgcggcggcgaggcaggtcgtggccgtgctggagaagtttgagcgggcgttcgatgagtgctccgggggcaaggcgttcttcggcggggacgctgctggcctcgtggacgtcgtgctaggcggcttcctcgggtggctgcgcgcgtctgaggtgatgtgtggcgtgagggtcatcgaccccgccaagacgccgctgctggcggcgtgggcggaccg

SEQ ID NO: 363 - DNA, 117 bp, Zea mays
  misc_feature: Incyte ID No: 700156813H1
  unsure 77, 96, 106, 112: a, t, c, g, or other
ctcaacgataccaccaccgctagcgctagtgctctactgctctgctctttagggagagagagacgggagtgagagancagagatggcagctgaganctagactgancacgcncgtaa

SEQ ID NO: 364 - DNA, 118 bp, Zea mays
  misc_feature: Incyte ID No: 700156815H1
  unsure 105: a, t, c, g, or other
cactggtggtgccagtggtggcagccaaagctatgatgcttgaggggggcaggatcctattaagtgcattatcaaccaagatatttgaaataatgaacttttganccaaaaccaatac

SEQ ID NO: 365 - DNA, 132 bp, Zea mays
  misc_feature: Incyte ID No: 700156817H1
gctttacattgcttgaaacatgcattcagctagacgacccatttttttcttcccgtttttttttcactttctcccttagaaacattaggcccccttatcattgtataagtgcctattataatgtatcattca

SEQ ID NO: 366 - DNA, 259 bp, Zea mays
  misc_feature: Incyte ID No: 700156819H1
gctgctcttgatctgagccacactcaaaacattggtagaatgatcaaggctcattttccgcactctcagttcatagttgtctctttaaaagagggtatgttcaacaacgccaatgtgatatttcgaacaaaatttgttgatggtgtgtccaccgtgacacgaacagtgccttcgaaacagagatgaccagtttacacatcatgcatcttctgaaccaaaactaggcatacaattccaaaactgtcattttaaggagctg

SEQ ID NO: 367 - DNA, 255 bp, Zea mays
  misc_feature: Incyte ID No: 700156822H1
ggaagtgtcagagttgttgatcatcagcgtctaagcagctctgggtatgttttctctgcatctctgccaccttatcttgccagtgctgctgtttctgccgttaactatcttgaggaaaatccctcagttcttgcaaacctaaggagcaatattgctctttgcataaagaactatcagatactccagggcttgaaatttccagccatgttctgtcacctatcgtcttccttaagctgaagaagtcgactggttctc

SEQ ID NO: 368 - DNA, 256 bp, Zea mays
  misc_feature: Incyte ID No: 700156823H1
gcttgagaccattgtcaagaactgtgacaaggccttctcggaagttgcggccgagcgggttcttgatgagatggtcaggttgattgatgatcctcaaaccgtggttaataacaggaacaaggcccttatgctcattgaagcatggggggagtctggtgatgaactccgttatctgccagtctatgaggaaacatacaagagcttgaaatcaagaggagtgcggtttcctggacgtgacaatgagagcttggctcct

SEQ ID NO: 369 - DNA, 82 bp, Zea mays
  misc_feature: Incyte ID No: 700156824H1
  unsure 2, 18, 24, 45, 55, 57, 60, 64, 70: a, t, c, g, or other
gnggagggaacgacctgncgggcncggacgggagcttcttcgaangggcgcgacnanganggcngcgtcnagatcgactgca

SEQ ID NO: 370 - DNA, 84 bp, Zea mays
  misc_feature: Incyte ID No: 700156825H1
tagccagccagctgctagctcctgcggacgagccgatggctggcgccgacgtcgacgtcgggacggaactccggctcggcctgc

SEQ ID NO: 371 - DNA, 260 bp, Zea mays
  misc_feature: Incyte ID No: 700156827H1
acgacgtcagcaaggcgaccgggaagtcccgttcccccattattagtgtgatgacaaccaaagatagtggcagcagcttttctgtttttagcaagttgaaggcgctcatcagggacaaattcctggtgaagaagctgccttcatcgtgccagaggtccttgttaggcagcaaagaaacagcggcagtgagcgagctgctgcagatggtggtgtcgtcgctcctcttaacaccaacggaggtgacaggccccacgacgatg

SEQ ID NO: 372 - DNA, 85 bp, Zea mays
  misc_feature: Incyte ID No: 700156828H1
  unsure 21, 55, 76, 78, 80, 82: a, t, c, g, or other
cgttcacgcgcggcgtccgtncggcatcctcctcctctccctgctggcggcatcnggctcgctgtcgctggccgcnancngnccg

SEQ ID NO: 373 - DNA, 263 bp, Zea mays
  misc_feature: Incyte ID No: 700156830H1
  unsure 60: a, t, c, g, or other
ttcttattgaccagggatatagcttcaaggttatcactagtttgccgccggctgaagaangacctaatctgagctattacacacttgatgaacaacttgagctcttgagcatggcgctgaatgcaggggatgacatgattggtgttgagcgcttagaagaagattctgatggcaaggctcttattagagcacgacgctctgccggatcaatgagtgccttctctggagctggtggaatggtctacatggagtacagcactggg

SEQ ID NO: 374 - DNA, 234 bp, Zea mays
  misc_feature: Incyte ID No: 700156831H1
gcccgtgctggtgcgctcaccaaagttatcctcccctgcctgctgcgtgctatgtctgaatcgtgaacaaccgttgtcatttcatgtgtgtaccccgtgcaatgctttgtgcgcatggttgatttctctgtggcaaacttcccgtcctgcatggggttgtaagctgtctctaaatttcacggcaagtcgtgtgcctgaaccttcatcttaagttgttgtcgtatcccttcgtct

SEQ ID NO: 375 - DNA, 267 bp, Zea mays
  misc_feature: Incyte ID No: 700156832H1
  unsure 256, 262: a, t, c, g, or other
ggagattgaactcagcaagcaacaccatgccagcgacttgcaagagaaaaatagactttcacggatgttggagcacaagaatgctttacaggagagaatcatccaagaacgtgcagctgagtttggccgtctgaagaaagagagagatgaacggatgaatcggttgatatcttcaagaaagcatgaaagggagacagtaaggaagttgatgttttatctgaacctggaggaacagcggattgaaatgcttcgtgangaagangaact

SEQ ID NO: 376 - DNA, 256 bp, Zea mays
  misc_feature: Incyte ID No: 700156834H1
gccgacgcaggcgaacgggaggcggtcatggccaccgtcaagaagggaaagcccgacctcaggaagaaagtgatgcctgccgtcatcgtccgccagcgcaagccgtggcgtcgcaaggacggtgtctacatgtacttcgaagataatgctggagtgattgtgaatcccaagggtgagatgaaaggttctgcaatcactggacctatcggcaaggagtgtgctgacctttggcctaggatcgctagtgcagcaaatg

SEQ ID NO: 377 - DNA, 216 bp, Zea mays
  misc_feature: Incyte ID No: 700156836H1
agcacagctagcgcctgctccccttcgcctgtgatcatgtcttgcagcagcggcaagtgcgactgtggctccagctgctcctgcggcagtcatgcaactgcatgtcccctaacgtggagaccgccgccgccagcagcatcaagaccacggtcctcgccgcgccgaccaccaaggccagcgccggcggcttcgaggcggccaccgagggcggcggct

SEQ ID NO: 378 - DNA, 252 bp, Zea mays
  misc_feature: Incyte ID No: 700156837H1
  unsure 165, 167, 169, 171, 173, 179: a, t, c, g, or other
gtacgagccgcacttcgactacttccacgacagggtcaaccaggcccggggcggccaccgctacgccaccgtgctcatgtacctgtccaccgtccgcgagggaggcgagaccgtgttccccaacgccaagggttgggagtcccagcccaaggacggcaatttctncnantntncacacnaaggattggcagtgaaaccggtgaaaggcgacgccgtgctcttcttcagcctgcacgccgacggcacgccgga

SEQ ID NO: 379 - DNA, 251 bp, Zea mays
  misc_feature: Incyte ID No: 700156838H1
  unsure 146: a, t, c, g, or other
aattgagattaacacatttcttcccacagattgcagttcttggtggctctttgctgggaacattcctgtctgaaaagattatagcatacattggagggagcctattcttggcctttgctgcgattaccatagttgagatagtgacntgaaaagggagttccagcttccacaatttataaaaagtactgatcttttgtcagggcaatgaacaatcagcttgatcgtaatggtagtacattgatgtggtaccg

SEQ ID NO: 380 - DNA, 252 bp, Zea mays
  misc_feature: Incyte ID No: 700156840H1
gatgaattccggaatataattgttggttcaaagagacgtagaaaggaggttgtctattcggactcttttggtgatcagtggatgaaatccgacgagggatttgaagagattgcaaagatgactccaagggtgaagcgaactgcttattcgcctgacattcaagttgagtacaatgaaaggaggaaaaggcccaagtctgtggaaaacagcgcagatggcgcaacaacccaacacggacacccgacaaaggaa

SEQ ID NO: 381 - DNA, 253 bp, Zea mays
  misc_feature: Incyte ID No: 700156841H1
ggggccgcagctactgattgcctgtgctgggattatttctggattcagttctagtgagttatgtagctttgaagtgtcggatacaaatccaaaaatccatttacattgcgttttacatcgacttgcagttctcatgtcatcactgctgacaaaagccatcgatttcctgtggaccatgctattcgagtttgaatgttgcaaggatgagaatacgtacattcttttactggcgtgcagtgttataattagaaaa

SEQ ID NO: 382 - DNA, 254 bp, Zea mays
  misc_feature: Incyte ID No: 700156843H1
cgtctccgtccggggcaaggtctacgacgtcacctccggccgcggcttctacggccccggcggcgcctacgccgtcttcgcgggccgcgaggcagccgcgccctcggcaagatgtccaaggacgaggccgacgtctccggggactctccgggctcaccgacaaggagctcggcgtcctcgccgactgggagaccaagttccaggccaagtaccccgtcgtcgcccgactcgccgccgacgcctgaactcggcag

SEQ ID NO: 383 - DNA, 192 bp, Zea mays
  misc_feature: Incyte ID No: 700156845H1
  unsure 6, 42, 54, 62, 81, 83, 85, 92, 110-111, 120, 137, 165, 188-189: a, t, c, g, or other
gccgcncagaacggcgacgcgtcgtcgtcgccgccgcccgcngcggcgcccgtnttcccgangtcggtgtcgccgtacgtntncngcaggangtcggacacgtcgggcgnnatcggcgcnctcaggcaccacccgancctgctcttcttccggacgccgcagtanggcccgcctactgcgcggcgcgnngga

SEQ ID NO: 384 - DNA, 260 bp, Zea mays
  misc_feature: Incyte ID No: 700156846H1
  unsure 31: a, t, c, g, or other
gtttcagatacataaggcctacggcagcacnaaccatctgccttcagctcatacttgctttaaccaactagacttgcctgagtacacatccaaagagcagctccaggagcggttactattggcaatccacgaagcaaatgaaggtttcggatttggctaatcagttatactcgtttgtccgtgccctgagaactgcaataggcgagcagcacgtgtgtggctgatcacattatgaactccacgtgtgtgatgagagatgg

SEQ ID NO: 385 - DNA, 260 bp, Zea mays
  misc_feature: Incyte ID No: 700156847H1
tacgtcctcctccattaatattggcagcaagctagctaggatcatcagcatctgagcttattattactaaatcgatcggttgccatggcgatgagagtcggcaagctggcgctggctgcggtgctgctgtgcgcggcggcggccatggccacggcgcacaggcctccggcgtgcgcgccacctacaacttctacaacccgcagcagaacaactgggacctcaacgccgtgagcgcgtactgcgcgacgtgggacgccagc

SEQ ID NO: 386 - DNA, 72 bp, Zea mays
  misc_feature: Incyte ID No: 700156849H1
gtttctgttagtttcgagcttgagctctcaatgtttactctttacattgaaatgctgccgtttggacatgtt

SEQ ID NO: 387 - DNA, 259 bp, Zea mays
  misc_feature: Incyte ID No: 700156850H1
gagcttccagatgcacatccacttttacaacagctaggacttgaccaacgggaacatgatgatcctaccccatacttattggccatatggacaccagatggaataaaggaaataactaagacaccaaaaccatgctgtgaccctcaaatgggaggcgatttatgcaataatgaaatgtgccacaattgtactgcagagaaagaaaaccaatctagatatgtcagaggcacaattctggttccttgtcgaacagctatga

SEQ ID NO: 388 - DNA, 256 bp, Zea mays
  misc_feature: Incyte ID No: 700156851H1
  unsure 127-160: a, t, c, g, or other
gcgaaagggcaagctttgtggcggcggacggcggctgcagctagagccgggcagcgggcgacgcatcctgccatcgtcctcgtccggccagctgcacactgtgatctaatacaatggctagcgatgnnnnnnnnnnnnnnnnnnnnnnnnnnnnnnnnnngacctgaggcatcgttgtaagcttgttgatgaagatctagatgataataatgtaccatgaatgctatgaatgtttcttattgtacttgctccgtaa

SEQ ID NO: 389 - DNA, 93 bp, Zea mays
  misc_feature: Incyte ID No: 700156852H1
tagtttaataacctgttgcacttgccatactccttttcttgtggaagtcttgtaatatgtgttgcttatatatcttaaaattacctactaatc

SEQ ID NO: 390 - DNA, 256 bp, Zea mays
  misc_feature: Incyte ID No: 700156855H1
aagagcttcatcattagcatctctgttggatgatgactttgtggatccatctaaagagctgaacctgcaaaatatggacaaatcgagatctgatgctctgacaactaccatagaccaagttgctgttattgaattgctggttccttcaatatttagagctgtagtgtcattgcatcctgctggatctactgatcctgatgcagtggcattcttctctcccactgagggaggaagctatcttcatgcaaggggcaca

SEQ ID NO: 391 - DNA, 52 bp, Zea mays
  misc_feature: Incyte ID No: 700156856H1
aatatggataatgccaacttaattatatttatataataatgtgttttgatgt

SEQ ID NO: 392 - DNA, 256 bp, Zea mays
  misc_feature: Incyte ID No: 700156857H1
atcaaattgatttactgtgatatcagcatcagtcttcttccttcggatcctttttgtttttttctctaaaccaccaataggccttgctgaacctcgtatttctttcgccttgggtttcatgcctgttgctgtaggtctaccattcttcttgttttgtttgtcatctaacaaaatagtttgaacttataattagagacagtcaacttgaaggatcatagttgtgtgatagaaagtatgtaccttgcggtatacacga

SEQ ID NO: 393 - DNA, 254 bp, Zea mays
  misc_feature: Incyte ID No: 700156859H1
  unsure 35, 60, 75, 78, 88, 91, 93, 116, 119, 167, 177, 202, 229, 235, 244-245,247, 250: a, t, c, g, or other
gcgagagagccgcgcacctatctggcaagcgacgncgcggcctcgatcggagtcggaggngaacacccccatggnggnggctggcggnggngngcgttccttgtagccttttgcgncgncgccctctcgtcggccaggtgaccgtgaacgagcccatcgtcaacggnctctcctggngcttctacgacgcgtcctgcccgtncgtcgagggcatcgtgcgctggcagtngccgangccctccgnngnganatcg

SEQ ID NO: 394 - DNA, 123 bp, Zea mays
  misc_feature: Incyte ID No: 700156863H1
  unsure 36, 94-95, 104, 110, 114, 118: a, t, c, g, or other
acatagcacgctaggtctttgaactatgcatatganattgaattttggtacattgatttggattttaaagtttaaataaaatggaataaaaaannataaaaganaaaganaganaaanaaaag

SEQ ID NO: 395 - DNA, 168 bp, Zea mays
  misc_feature: Incyte ID No: 700156865H1
  unsure 11, 23, 79, 98, 102, 104: a, t, c, g, or other
gaatccgggcntccgggaaagcngccctaatctcaaggccgcggctgcgagcgctgcttcccacctcccaactccagangtcctccctagacgccgcnagcngngcgcacacccaccgagagctcctcgggctttctttctccgttcctccctcgcgcgctcagggtt

SEQ ID NO: 396 - DNA, 255 bp, Zea mays
  misc_feature: Incyte ID No: 700156868H1
  unsure 195: a, t, c, g, or other
tgcttccacgtgactgcggctctccttgatgtgtcccctgttactgatgtcaccgctgtaaaggagccacacgtctttgtgaggccaatttatgctggaaatgcactttgtactgtgaaatatactggagaggggccttgcatgatgagtattagatcaacttcattttccccagctactgaggctatgtctganacaaaggttgcacctatcacccaggttgatctctctttcctcagtgaagggaaatctaca

SEQ ID NO: 397 - DNA, 254 bp, Zea mays
  misc_feature: Incyte ID No: 700156869H1
  unsure 196: a, t, c, g, or other
accaaggaccagatcacagattattgcacggccatcgaaggcgatgagtgctgcagctgttgggacgcttactttgaactgaataaacttgagcaagagctgcccaaagacgaaatcgcaaggatggtgaaggactcggagggtgacgtgaggtacctgatagagagcatccaccatcgctcggatctgcggaagnaggtggcagagaagtctcgcaattcagtaccgtcaagctcccagggtagtagagccgc

SEQ ID NO: 398 - DNA, 253 bp, Zea mays
  misc_feature: Incyte ID No: 700156870H1
cgaaaccgtaagaagcgcagagtgtgagagagaggggcatcaaggacgacgtgggcaagatgatgcaggtgttcgtgaagacgctggcggggaagacgatcacgctggaggtggagggcagcgacgccgtcgagaacgtgaaggccatgatccagggcaaggaaggcatcccgccggaggagcagcgcctcgtcttcgcgggcaagcagctggacgacgacggccgcaccctggccgactacggcgtccagaa

SEQ ID NO: 399 - DNA, 252 bp, Zea mays
  misc_feature: Incyte ID No: 700156872H1
gttcttgtcaagtctcggaagagggaccctgagctgcattactcccttgttggctgcacctgtgcccctggcttccagtacgaggattttgaaatggccaaatttgaggacgtgagatccatcgctcccaaggctgaacctttcctcaagtttcttattcccactatcgagtaactcctgagcagcctcatatgattgtggatgggttctcacttctcagcgactttctatactgcatactgtacggatggt

SEQ ID NO: 400 - DNA, 253 bp, Zea mays
  misc_feature: Incyte ID No: 700156873H1
  unsure 212-215: a, t, c, g, or other
caaagagcttgattataatactaggataagctacgcttctctttggaaggcacttgtttttgctgatgcaaaagcaattaaggagaacagtgccaaactgggtgctggggaggatcttcatgcactctttgctggtgttctcactatgagaccatggaaaagggtgattgacccatctcctgatcatcttgttctaggaaaaaatactgatnnnncagaattacagaattacgcctccttatattttactgag

SEQ ID NO: 401 - DNA, 164 bp, Zea mays
  misc_feature: Incyte ID No: 700156874H1
  unsure 24-25, 27, 29, 36, 49, 55, 59, 65, 78, 84, 86, 96, 105, 117, 135: a, t, c, g, or other
ctgccaacaaagttgtggcagttnngncnctcttgntcccaacaaggancttgtnaacnttgtcncttgcatagcgancaattncntttaaccatngcttcacantattgaagcttncttggtctgtcacgtcanatacaataatgattccaagctccttgttg

SEQ ID NO: 402 - DNA, 165 bp, Zea mays
  misc_feature: Incyte ID No: 700156875H1
  unsure 14, 74, 132, 150: a, t, c, g, or other
ggcagaggcaagangcccctcaccctcaggtgatcaggtcgctagctcccggcttaactagtaggcagccatgnatttcggtgggaatggcaacgcgacgatccggtgcaagtactgcagggcgagcctgancgtgatccccggcgagcncgccatccagtgcgc

SEQ ID NO: 403 - DNA, 250 bp, Zea mays
  misc_feature: Incyte ID No: 700156877H1
ctaagacaccagacatcacatccattgctcccatttcccactattgctgaaggcgatgagtctgtatttgtcaactccaattcaaacagctcgatggtgcctcctgtcctggagaacaatgctgttgatctcactgatgggctgacagatttggaatcctatatgaggtttcttatggatggcggtgcaagtgattcaattgatagccttctgaaccttgatggatcacaggatcttggtagcaatatgg

SEQ ID NO: 404 - DNA, 249 bp, Zea mays
  misc_feature: Incyte ID No: 700156878H1
  unsure 148: a, t, c, g, or other
cgacgagttcatggaggcgtactgccgggtgctggagcggtataaggaggagctgtcgcggccattcgacgaggcagcgtccttcctcagcagcgtccggacgcagctcagctccctctgcggcgccgccgcctcgctctcagatganatggtagggtcgtcggaggaggacgaagcatgctcgggaggagacacggaggcgacggagccggggcagcaggagcacagtcccgcctggcggaccatgag

SEQ ID NO: 405 - DNA, 253 bp, Zea mays
  misc_feature: Incyte ID No: 700156880H1
agaattgcgccccgctcatgctccgcctcgcatggcactccgcgggcaccttcgatgtggccaccaaaaccgggggcccctttcggcaccatgaagaaccccgccgagcagggcacggagccaacgccggactggaaattgccatcaggctgctagagcccatcaaggagcagttccccatcctatcctacgctgacttctaccagcttgctggagtcgtggcagtcgaggtaacggcggactgatgtccctt

SEQ ID NO: 406 - DNA, 97 bp, Zea mays
  misc_feature: Incyte ID No: 700156881H1
caacattttgtagtaccttttattttgtatcacctgctctatacacgagttttcttggaacatcggaaataataatgccctccagtatcttgcgacc

SEQ ID NO: 407 - DNA, 177 bp, Zea mays
  misc_feature: Incyte ID No: 700156882H1
  unsure 48: a, t, c, g, or other
ggttgcagcaatattctttgatttcacacatagttcctgcacactttnccgttcctgcctgccccctttgggcagggcgcataccttttgtgccgaattatttacgagcccctgcaattgtatgatgaatgaacaatgaatgatacagattaataagattaattaacttatctcttg

SEQ ID NO: 408 - DNA, 67 bp, Zea mays
  misc_feature: Incyte ID No: 700156885H1
  unsure 19: a, t, c, g, or other
tgctcttcatatgcttggngtgaagatggctcatggttgccactctggatgtcttattgttcaggtc

SEQ ID NO: 409 - DNA, 156 bp, Zea mays
  misc_feature: Incyte ID No: 700156887H1
  unsure 15, 35, 42, 45-46, 48, 97: a, t, c, g, or other
gttgaaatctttgancatcatcgccatcatcaagngactggnaanntntgccagacctgcaggacaacagttctggcaaattttcccagtctcttgntgatggatgatgttgacaatctttgaacaatgatacatgattgttgcattttactggtg

SEQ ID NO: 410 - DNA, 248 bp, Zea mays
  misc_feature: Incyte ID No: 700156888H1
gttgcacttggactacttgatgagggcaaagttgttctgggtgtgttgggatgtccaaatcttccattaaaatcaacaaacaagaacaatagcagctcttttggggatcgaataggttccctcttttttgctacaattggttgtggagcgcaagttgaggccttagaaggatctgagccacaaaagattagtgtttgctccaccaataatccagttgacgcctcattctttgaatcctttgaagcatc

SEQ ID NO: 411 - DNA, 249 bp, Zea mays
  misc_feature: Incyte ID No: 700156889H1
gtgaccaactcgaagcttgcgttcttgtagtagaggtcggcagcaagcggtagagcgagaggtcgagaagatgaagagcagcactctgttggcgatcctagttctccaggcccttctggtctctacggccgtggccaaaggacctgcagggccgaagaagcagtgctggtgcggcgagtgcaccagctggtcgggcgtgtggacctgcgacgacctcctcaccaagtgcgccgccacctgcaagaactg

SEQ ID NO: 412 - DNA, 249 bp, Zea mays
  misc_feature: Incyte ID No: 700156890H1
gcaataaatgattcaactgacatcattactgggtcgttcttaagaaaaaaaatgtggaatcgtaggcgcgccaaaggaacaaaactattgctctgaaggttgcaaaaattgtatgtttgtagcaacatctcttttagttggcaattcatgtgtttttatatttcgaaaaggaatgggtggtgaatgacagcttagatattccttcaggtaatgtgtacatagattcaaagtatgtaacttcagcagaaa

SEQ ID NO: 413 - DNA, 250 bp, Zea mays
  misc_feature: Incyte ID No: 700156891H1
ctaattcctaaagcagcatcggctactaccactgtctcttgctcacacagctcgtctgtgcagcacatagctagtgaacgagaacgaccatggcgtcccaggccatcgagagccaccgtgccggcgctgaggtcgtcaccggaggagacgccatctgcaggaagaagtcaatcgaactgctggaggagctcggcctccccaagggcttcctgcccctcgtggacatccaggagttcgggtacaaccgcga

SEQ ID NO: 414 - DNA, 246 bp, Zea mays
  misc_feature: Incyte ID No: 700156892H1
atcttgatagacaagaactaccgtgcaaaggtcgcagattttggtttaacaaaacttacagaagttggtaatacatcactacccacacgtggaatcgtgggcacatttggttacatgcctcctgaatatgctcggtacggtgatgtttctccaaaggtcgatgtttatgcctttggcgttgtcctctacgaacttatttcggccaaagacgccattgtcagatcaaccgagtcttccagtgattca

SEQ ID NO: 415 - DNA, 245 bp, Zea mays
  misc_feature: Incyte ID No: 700156893H1
ccatcaagtatacatgttccacaaggagattcttctggactacgtgcaccatgatatcaccagaaagtgggctttgatttacttcaagctgcttttgctggtgatggcgaaggacaccatcatgtacttcaatctgttctaagctcaccttctcagtttctcaaatatccagcaatgcatccgtctctgcactcgtagaataatgatgatggatgaattatgcagccttcgttcttgtattctcc

SEQ ID NO: 416 - DNA, 246 bp, Zea mays
  misc_feature: Incyte ID No: 700156894H1
cgctccctcggtctcgacccgagcgatcaggagctcaatgatatgatgagcgaggtcgatacggacggcaatgggatcatcgatttccaggagttcttaagcctcattgcccggaagatgaaggatggcgacggcgacgaagagctcaaggaagcctttgaggtcctggacaaagaccagaacggcttcatctccccggttgagctgaggacggtgatgaccagtctcggggagaagatgaccgac

SEQ ID NO: 417 - DNA, 248 bp, Zea mays
  misc_feature: Incyte ID No: 700156895H1
ctctgtcggacccgagtactatgtcagcatcctctcctttgtcgacaaggaccagctcgagccgggatgctccatcctcatgcacaataaggttctttctgtagttggtatattgcaagatgaagttgatcctatggtatctgtgatgaaagttgagaaagcacctttggaatcttatgctgacattggtggactagattcccagattcaagaaattaaagaggctgttgagcttcccttgactcatc

SEQ ID NO: 418 - DNA, 253 bp, Zea mays
  misc_feature: Incyte ID No: 700156896H1
cgactccgccgccgctcccgctccgccccagcgcatcgcccgccgccacagcgtaccgcgaacctcatcgatcaccttcagctttcaatcatggccgacgtcgatgtcgaaccggagttgccgccggcgctcccaagaagaggacgttccgcaagtacagctaccgcggcgtcgacctagatgcgcttctcgacatgtccacggacgacctcgtccagctcttccccgcgcgcgccaggagaaggttccagag

SEQ ID NO: 419 - DNA, 257 bp, Zea mays
  misc_feature: Incyte ID No: 700156903H1
gttcttggtattgatctttcggtgaacatggtttcatttgcaattgaacgtgccattggacgcaagtgctctgttgaattcgaagttgctgattgcaccacaaaggattacccagaaaatagttttgacgtcatctacagccgtgacaccatccttcacatacaagacaagcctgctctgttcagaagcttcttcaaatggctaaagcccggcggcaaagtcctaatcagcgactactgtaagaatcctggaaaacc

SEQ ID NO: 420 - DNA, 256 bp, Zea mays
  misc_feature: Incyte ID No: 700156905H1
ccttctgctcgaaatgtaccgctgcaagcatcaatgactgtgacagatgagcctggttattatgaagatggggcctttggtataagattggagaatgtacttatttgcaaagacgccaatgctaagtttaattttggagataaaggttatttggcatttgaacatataacatgggctccataccagaccaagctgatagacaccgggcttctgacccctgttgagatcgactgggtgaacacgtaccactcagact

SEQ ID NO: 421 - DNA, 257 bp, Zea mays
  misc_feature: Incyte ID No: 700156907H1
tgtggattacgagtacaagtcggtaaaccctaggacagatccaggtaactgcaacaacttgaaacaattcgtgtattgcgattatgaaaaaatcaatccaatcaaatatattccagcattagtagatggggacatagtcgtttctgattctcttgccatctcattgtatttggaagataagtatcctgagcatccactcctgcctaaagatctcaagaggaaagctcttaatcttcagattgcaaacattgtttgtt

SEQ ID NO: 422 - DNA, 259 bp, Zea mays
  misc_feature: Incyte ID No: 700156908H1
  unsure 48: a, t, c, g, or other
ggagcgactcgccaccggcgcggaaaaggagggcggaggctcgatggnggatgagaatcaggctggaaagaaagaggaggaggaatttagcacaggccctctgtcagtcctaatgatgagtgttaagaacaacacccaggtcctcatcaattgccgcaacaacaagaagctacttggccgtgttcgtgcttttgatcgccactgtaacatggtgctcgagaacgtgcgtgagatgtggacagagatccccaagactggc

SEQ ID NO: 423 - DNA, 257 bp, Zea mays
  misc_feature: Incyte ID No: 700156909H1
attcggtattgagaatttgcgataccgatctgggagaagagaagggcgtcatgtcgtcgttcggacgcaattcatggtgtatcctcgtgctggcctccgtgctcctcctgtcctgcctcgccgacacggccgtggccaagcgaacaggcgagctcaccgtcttctggggccggaacaaggaggagggcacactgcgtgaggcctgcgacaccgggctctacaacaccgtcatcatctccttctacagcgtcttcggc

SEQ ID NO: 424 - DNA, 255 bp, Zea mays
  misc_feature: Incyte ID No: 700156911H1
accaatctttcaggatggtccacaacttacaggcattgctgacaacctgaattacaggcacagaaatgcccagatggcaagcagagcatcagttgaactccacacccacatatatttcaagacaaggccaactgacactgaagctaggatagtaaagatcaaggcaaatggtttcatagtatttgtcccaaagtttggcatagaagggcccatctaccttactccgaaggcgacaaaggcggtgattgggttgtt

SEQ ID NO: 425 - DNA, 253 bp, Zea mays
  misc_feature: Incyte ID No: 700156913H1
gctcaacaccctcgaggtacctccattcgcagtcggccgtgtcctcggagccgcgggagatggcggatcaggagacagtagctgtggttgaggcacctaccccggttctaggggaaccgatggacctgatgactgccctgcagctcgtcatgaagaagtcaggtgctcacgatggccttgtgaagggtcttcgtgaggctgccaaagccatcgagaagcatgccgctcagctctgcgtgcttgccgaggactg

SEQ ID NO: 426 - DNA, 256 bp, Zea mays
  misc_feature: Incyte ID No: 700156915H1
aatctatccaagcaacaaacttggcattcttgcctgttcttaattattgccaggacaggagaaacaaagatgaggcctcagctgatactcgtcggcactctggctgttctcgccatcctcgcagctctcggcgaaggctcgtcgtcctggccctgctgcaacaactgcggtgcttgcaacaagaagcagccgccggagtgccagtgcaatgacgtgtcggtcaacgggtgccatccggagtgcatgaactgcgtca

SEQ ID NO: 427 - DNA, 182 bp, Zea mays
  misc_feature: Incyte ID No: 700156917H1
  unsure 114, 162, 166, 173, 178, 180: a, t, c, g, or other
tttaaaagtaagaagagaaatgatatgaaaataaaaataatatcaatatatttctagaatttgtacttttcatttcataatatgatttgataacaaatttgtacaaggattganactaaatttgaattcaaactaaaaaccttggaaatgaagaaaataganaganaaataanaagananag

SEQ ID NO: 428 - DNA, 252 bp, Zea mays
  misc_feature: Incyte ID No: 700156920H1
aggagcgagagagaacccaaacggagagagacaatcgagagagatggcaaactgttttggtgacgtcgtggacaattacaagctagacacaatgccaagatatatcggcaaaaagaagactcgagaagaccgggcacgagaggcctcctatctcagtaatgagaatgagaagtacaagaaagctaaagactatgtgaacatgctgaaggactggtacggcaatggagcgtcgacgctgtgctgatctacaac

SEQ ID NO: 429 - DNA, 188 bp, Zea mays
  misc_feature: Incyte ID No: 700156922H1
gtccaaagtcgcgtctcccagcctccctccactgtcccacaccccaacactgttccagtccagcggctagcactagcagacagagcccctcctccccctagctcttgctcttccacaggcacagcgcaacgcttccagctagtctcgagacgaccggcagagatgatgaggcgttgcagcatcgccgc

SEQ ID NO: 430 - DNA, 251 bp, Zea mays
  misc_feature: Incyte ID No: 700156923H1
gtcagtccccttacttcgccggctcattcggcggcgacgagcaccagaaatcctagctgctttgagtatggaggcgctgtttgggtgcaacaaacatggcggggacaaggccgctgatttggcctcgtttataatcgtgcaggctgccttggaggtgccaaggttacttgggctccttgccatgattcttcataatgaaatctttacatctggtggagatcagaatttgattaataggattctgagcaaaa

SEQ ID NO: 431 - DNA, 254 bp, Zea mays
  misc_feature: Incyte ID No: 700156924H1
gaagatgataaccctcaaaagctccgatggcgaggagttcgaggtggaagaggcggtggcgatggagtcgcagaccatccgccacatgatcgaggatgactgcgccgacaacggcatccctcttcctaacgtcaactccaagatcctatccaaggtaatcgagtactgcaacaagcacgtacatgccgccgcagccgcagccgccgcctcgaaggccggttccgacgacgtgggtgccgcctccgccaacagca

SEQ ID NO: 432 - DNA, 251 bp, Zea mays
  misc_feature: Incyte ID No: 700156925H1
  unsure 104, 135, 148, 150, 191, 211, 223: a, t, c, g, or other
gtcccaaccaaaggctgcgcgcttcacgcccggcaggagcagcgacgagaacagccaaggagagatctgcagaccggtcggtcgatcgagatgaagagccggangagagcagcgggggcagctcgggcgcctgcnccgcgggggagangnacgcgcacagcagcggcggggggtgcaagctggagaggaangacgtggagaagaaccggangctgcacatgangggcctctgcctcaagctctcctccctc

SEQ ID NO: 433 - DNA, 170 bp, Zea mays
  misc_feature: Incyte ID No: 700156926H1
acgggttcttgctgcctcttcgcatacatgtgaatactgtaaataccgttgcctgaataaaagcttcagcctgcaagctacaagcaatataccaatgttctgactctgaagcactggttttacatgtctctacgtgtatatgtgtatgtgatacatgacagattactttc

SEQ ID NO: 434 - DNA, 250 bp, Zea mays
  misc_feature: Incyte ID No: 700156927H1
ggaaagctgctgacattgagatcttgaatacattccagctactttcagctaagccagttgtctatttggtgaatatgagcgagaaggacttccagagaaaaaagaacaagtttctacccaagatacatgcttgggtgcaggaacatggtggtgaaaccatacttcctttcagctgtgcttttgaacagaaactagtggacatgccagaagatgaagccgccaaatattgtgccgaaaaccagataacaag

SEQ ID NO: 435 - DNA, 248 bp, Zea mays
  misc_feature: Incyte ID No: 700156928H1
agcaaagcacacacgtgataaaatcccctctaccaaattgcaagcaacttcatattctacgcgaggtttctggtcgcggagatcaacgtccacctaccgcggcggcggcgcaacaaggatgacgtgcggtaactgccgcggggagctggacctggatcggaggtcgtgaagagcatggcgagtggggcggttgaggctgctggccctgctggggctgtcgaagctggaggtggaggccatccgggtcg

SEQ ID NO: 436 - DNA, 247 bp, Zea mays
  misc_feature: Incyte ID No: 700156929H1
ctgccgctcttcatccactccgtgcggccctacggcgacatcttcgtggtggacatcgacccagaggacgcgagcaagaacaaggacgtgaagaagttccaccgggtcacgcacagccgctacgagtactcgacgccgacgtggacggtgtttgccacggatgatcccaacgcgcagtggaacatgctggtgaagaaagactcgtacacgccggcgtgcccctacgcgtacccggacggcggcgaga

SEQ ID NO: 437 - DNA, 249 bp, Zea mays
  misc_feature: Incyte ID No: 700156933H1
aagtctctggactttagcaactatccttacatatatatgagatggaaagaacagtattttgtcaatgttggagttgactgtgggttaaccatcgctggtttctactacgtctgcttttcttgtagtgatggctccattagtggattttattatgatccaaatagcagtccgtttcagaagctcgaattgaagtgtaccaatgagaaaaattctggattcaccttttcatcctatgagctgcagtgacag

SEQ ID NO: 438 - DNA, 143 bp, Zea mays
  misc_feature: Incyte ID No: 700156934H1
gatgcgttcagtttttggtattttagaaccccattcttttagtgttgaagttaaattgattataggtgatagtggcattctattgtattgactcaatctatgtggattcttcttgatcgttgatgcctatgcttcaccgcttc

SEQ ID NO: 439 - DNA, 189 bp, Zea mays
  misc_feature: Incyte ID No: 700156936H1
gttgagcctcactccttattccattccaaccaactctacaggtttcttgcaaaagagcgtgggacgatgcaccatcatcttactgttcctctcctctaccacttacttaccctcctctccatctcttgcctcaccgatggcatctgctgcagcattgcccacagctatcaacctctccttctcttccgg

SEQ ID NO: 440 - DNA, 247 bp, Zea mays
  misc_feature: Incyte ID No: 700156938H1
aacgccatcaccatgtgcgtcaggatgtggtccgagctggcacggaccggcgggagcatcgccaccgtgggagcggtgtcagtgaaccacgaccgctcgatgttccgcccgcgcaacccgccggcctacagcgacgcgctcgacgccatgttcgccacgtacgacgaccaccggacggtgaacgccctgacggccgccgccagcttcgtggagcgcctctactacgtcgaggcggccgacatcgcca

SEQ ID NO: 441 - DNA, 246 bp, Zea mays
  misc_feature: Incyte ID No: 700156940H1
gtcttcatctatgtgtcctgatataagattctgatacgcaaatcatgtgtgtttccctttgtcaggtggatcctcaggatattgttatgcttgtcatatcgtggcatatgaaagcttccactatgtgtgaattcactcgccaggagttcattggtggactgcagtcaataggagtggattcaatagagaagcttcaggcgaagttaccttcattgcgagctgagcttaaagatgatcagaagttcc

SEQ ID NO: 442 - DNA, 244 bp, Zea mays
  misc_feature: Incyte ID No: 700156943H1
gtgaaatggaaaaacctctcttccaaatactacaccgctttgctaaaggtgtatgctaatcagaacctcttagacaagggtgaggaactagcaaagcggatggatgaggagggtgccaagtttgggaccccaactttgaatgcacttgtgaagctatatgctgacgctggagaggtggagaaagctgagtccctattgcacaagctatctctgaagaacaacgtcaagcccagttacagctcat

SEQ ID NO: 443 - DNA, 232 bp, Zea mays
  misc_feature: Incyte ID No: 700156944H1
  unsure 45: a, t, c, g, or other
ggctcaggttccaaagtgtccagtttcagaagccctttgtctaanctcgtcgagagcgtcgacgagggcagtgatggccatgaagatcaaaacgagtctgatcgagtcttgtatgctggatggaatacatctagcgttcctagcaaagctatgggccatagtggcaatgcctcaaaaagtgcaatgaacaggagtgccgatgaacaacttccatcaagtatgtgttttgtca

SEQ ID NO: 444 - DNA, 243 bp, Zea mays
  misc_feature: Incyte ID No: 700156945H1
gtggaaagctcagggcccaaagagccaagtccatgaagttcaaggatggctacatgatctcatctggtcagccagtgaacgagtacattgactcggctgtgagacacgttcttctcagacagggtgttctcggtatcaaggtgaagatcatgcttgactgggacccgaaggcaaggttggcccgatcactcctcttccggacctggtgaccatccacaccccgaaggacgaggacgagccgcg

SEQ ID NO: 445 - DNA, 247 bp, Zea mays
  misc_feature: Incyte ID No: 700156947H1
agcacatcaaagaagagctttgactttggctcatggaacgatgagttggatcagcagaagagggaattcccccttgggtataaaacatctaatgaggagatccagccacaatatgctattcaggttcttgatgagctgacgaaaggcgaggccatcatcggcacaggtgttgggcagcaccagatgtgggcggcacagtactacacttacaagcggccaaggcagtggttgtcttcagctggtcttg

SEQ ID NO: 446 - DNA, 278 bp, Zea mays
  misc_feature: Incyte ID No: 700156951H1
cgacatcatgactgaagagaacaaactgatcacagtgaatcccgacaccaaggtcctgcaggcaatgcagctcatgacagaaaaccgcgtcagacacatcccggtgatcgacggcacggggatgctggggatggtctccatcggcgacgtcgtgcgcgcggtggtggccgagcacagggaggagctgaaccggctcaatgactacatccagggaggctactaggacggcgtgtgcagcgacgaccccctccgatcccgccagtcagtgaagtccgcct

SEQ ID NO: 447 - DNA, 275 bp, Zea mays
  misc_feature: Incyte ID No: 700156952H1
gtgacttgtcttgccctggattcactgaggatttatagtggttcttgggacatgactgttcgtgtttgggacagagaccagatggagtgtgtgcaaaagttcatgcatgcagactgggtttgggatcttgctctgcgtggaaatactgttgccagtactgctggtagagatgcatatgtatgggatatcagggctggcgagttaacaagcttaatttccaatgcccatgttggtagcgcatattcaattgcttggacacacctgccagatgtgct

SEQ ID NO: 448 - DNA, 186 bp, Zea mays
  misc_feature: Incyte ID No: 700156956H1
ggcaaaatacatctacattgctggatttttcctcacggtgtcacctgattctatccagttagttgctgagcatgctgcggcaaataacaaggtgttcctgatgaacctctctgctcccttcatctgtgagtttttctatgatgcccaagagaaggtcctcccgtatgctgacttcatcttcggcaa

SEQ ID NO: 449 - DNA, 128 bp, Zea mays
  misc_feature: Incyte ID No: 700156958H1
caaagtgagcatggacggcgccccgtacctgaggaaggtggacctgaggatgtacaggggctacagggagctccgggaggccctggaggccatgttcgtctcctccagcagcgccaacaacctgtcgg

SEQ ID NO: 450 - DNA, 141 bp, Zea mays
  misc_feature: Incyte ID No: 700156959H1
  unsure 71, 96-97, 127, 136, 139: a, t, c, g, or other
atcacagctagctagcgttcctaatcacagacgaataatctcttcttcacctcactaacaccgagctagcngctcgctctgtcctgcaacaatggnngctcgctcctcctcccagcagctggtcgcngcggtggcngcngc

SEQ ID NO: 451 - DNA, 270 bp, Zea mays
  misc_feature: Incyte ID No: 700156960H1
  unsure 46, 54: a, t, c, g, or other
gggcgactacagggcgctgtacaagtacttctccacggtggcgaanagggcgcnggacaccgccgagggcctgggcctgtcgcgcgaggaggcctgccacaacctcctcttcgccaccaccttcaacagctacggcggcctcaaggtgctgttcccgggcctgctggccaacgtggccagcggcggcgagaagtccacgagcggctggtggccgagatccgcggcgccgtggccgacgccggcggcaaggtcaccctcgcggcggtggag

SEQ ID NO: 452 - DNA, 277 bp, Zea mays
  misc_feature: Incyte ID No: 700156963H1
gcgagacgcatctatggactgaagggaaggaacatagatgtttttgcagagaatagcagtttagccattaatcctcactatatccggtcctggttggatctgttgtcacggacaccacgggttgcaccttttctgcagaaaaacgaccccttcatagcagcactggaaaaggaactgtctgcacacactactgatgtgcatgttcaaagtgacgcgcttgatggcatgttcactttctatgatgcgacgaaagcaactctaaatgtctaccaggttg

SEQ ID NO: 453 - DNA, 187 bp, Zea mays
  misc_feature: Incyte ID No: 700156964H1
gtaacttagattgttcaagtgctgaacctgtggaagttgtgccaaaatttgttgtcgaacggatgaactattgtcgtaatgttatgccagcagcagatcttaatttgccccgttacatcgatgtctgattgcagtatcttcaaattgaaaggagttccgtttggtatgaatgtgtaatgttctacgc

SEQ ID NO: 454 - DNA, 181 bp, Zea mays
  misc_feature: Incyte ID No: 700156965H1
gtactgcattccatagcagcattattgtccgtagcagatgatggcaattcgctgctagcactagctgaagcttccttaacttgagcgggaatatcaatcttaactgaaggtctgattgctcgaattggagctgccagtgattcctttgggccttgggtttgcgcatccttcatctaaaatg

SEQ ID NO: 455 - DNA, 270 bp, Zea mays
  misc_feature: Incyte ID No: 700156967H1
  unsure 140: a, t, c, g, or other
caaggccaacaccatgagcgcgctggaggaggtgtaccgcatctcccgcgcgcagaccctcatcgcgctctgcggcacagtcccgggctactggttcaccgtcgcgctcatcgacgtcgtcggccgcttcgccatacagntgctgggcttcttcatgatgaccgtcttcatgctcggcctcgccatcccctaccaccactggaccacgccgggcaaccacatcggcttcgtcgtcatgtacgccttcaccttcttcttcgccaacttcgg

SEQ ID NO: 456 - DNA, 179 bp, Zea mays
  misc_feature: Incyte ID No: 700156968H1
  unsure 71: a, t, c, g, or other
aagtcgccaatccctcccccgagagagtcagaaatggcatcacctcatagttgctttcgcggctggcagancacgagccacgtcgcacttgcgctggtgtccgtgctgatcctgagctcggcacgtctctccgcgggcggcaggagcctgctggagctgtacaagccgccggccagcgc

SEQ ID NO: 457 - DNA, 119 bp, Zea mays
  misc_feature: Incyte ID No: 700156969H1
catcagctggcccatgtagatcttcgattcgcaacggaaatgttaagtgagcagctcattagacatggttgcatagattgacattaaacttatgcagggtgtctgtgtaccattttgtc

SEQ ID NO: 458 - DNA, 243 bp, Zea mays
  misc_feature: Incyte ID No: 700156970H1
  unsure 106-132: a, t, c, g, or other
ttttcgatcccttcgcaaagcgccgccgtcgccccatccggcatggctccgaagaaggataaggccccgcccccgtcgtcgaagcccgccaagtccggcggtggcnnnnnnnnnnnnnnnnnnnnnnnnnnnggaaagctaaaggagaaggtgaacaacgcggtgctgttcgaccaggctacctacgacaagctgctctctgaggtgcccaagtacaagcagatcaccccctccatcctatcg

SEQ ID NO: 459 - DNA, 141 bp, Zea mays
  misc_feature: Incyte ID No: 700156971H1
  unsure 73, 76, 102: a, t, c, g, or other
aatgtactatattgtactgtctactgtgataccatcgaaatactagcttaacaatcttgttgtgtcttgtgtnggntgagttcctgttctttctgtctatcnattctcacgcatggcagtttgggtatggtatgggtcgtc

SEQ ID NO: 460 - DNA, 267 bp, Zea mays
  misc_feature: Incyte ID No: 700156974H1
aacaaatctggctcaaagccctcgcgccatgcggaacccaactcaagggtcccaaagatgccacctccaaaggacgaggagagtgaagaggaggaaggggaaccacaggaagaccaggagagtgcgctgtgtggcgcatgtggcctaggttatgacgacttctggatctgctgcgacctatgcgagacatggttccacggcaagtgtgttaagatcaccccagctaaagcggaccacatcaagcagtataagtgcccctcctgcacg

SEQ ID NO: 461 - DNA, 265 bp, Zea mays
  misc_feature: Incyte ID No: 700156975H1
cgttttccctcaaaaccagcatgtgaccaagggcgagtatgatgagacggggccgtccattgtgcacaagaagtgcttttagagacaaatgccttgaactagcacggttggtgcaccatttgctgctgttcatgtcgcagttgtgctcgtacctgaacgttgcggccttgcgggtgctgatgcagcgatgcttgtgtctacaccttactccagccacatctcatacctgacggttgctaagtgttgatgcatctagctagctcgg

SEQ ID NO: 462 - DNA, 265 bp, Zea mays
  misc_feature: Incyte ID No: 700156976H1
cgatggccggactcgggacttcgtcgtcgcctggtacatcccgtgggacaacataccgacacgagcttacactgaaattggcagtgaaaactacttcaagactcggtggagtagtgtcaaaacgagtctaggacattcaaggagagtgacccgtgccaaggacgagaactgtgcgtcaactgtcagcatcggtggctacactacagccttctgcatcgcagtcctacaacaccagttccagccgctgccggaagagcgcgaataa

SEQ ID NO: 463 - DNA, 266 bp, Zea mays
  misc_feature: Incyte ID No: 700156977H1
aacagggtactcagcaaaacttctcaagaagcctgatcaatgccgagcagtatatgcgtgttcacatcttttttggactgatgaccaagatggtataatggatggtgaaagggttctcctttgtttgaagcgtgccttgagaatcgcaaatgctgctcaacagatggctagtgctacaagggggagcagtggatctgtaaccctatttattgaaattttgaacaagtacttgtacttctttgagaaaggaattccacaaatcacaa

SEQ ID NO: 464 - DNA, 266 bp, Zea mays
  misc_feature: Incyte ID No: 700156978H1
aaacgctcaagctgcaggagttactgctcattactacgaggatgagactgctcctactggcacatgtgctgtatgtgttgttggtggtgaaaggtcattgattgcaaatctgtcagcggcaaactgttacaaatctgagcatctaaagagaccagagaactgggcactagttgaaaaggcaaaatacatctacattgctggatttttccttacagtgtcgcctgattctatccagctagtcgctgagcatgctgcagcaaataaca

SEQ ID NO: 465 - DNA, 270 bp, Zea mays
  misc_feature: Incyte ID No: 700156979H1
aagagatcaaagagaaaaagtcgtcaggaaaaaaggtgacaaaaggtaaaggagaatcagctgaagcagttcttcccagcaaggacgatctgaggaagaccattactgaaatcctcaagaaagttgacttcaacacggcaactttcagtgacattctgaagaagctcgacaatcactacaaaatggatctgaccccaaagaaagaagccatcaaagttatgatccaagacgagttgaccaagctatcagaggaggatgaagaaggagagg

SEQ ID NO: 466 - DNA, 204 bp, Zea mays
  misc_feature: Incyte ID No: 700156980H1
  unsure 37, 41, 57, 73, 86, 122, 145, 193: a, t, c, g, or other
gccgccacctcaacccaggaacagagcgaggcgacgncgcngcacctcttctccgtngatattgattatttangcgaagggaaatngcaaccgttccaggggatctgatctggcaggttgtnggaagaacaactccttccttgtnaagcagttcggcaacggcaatgccaggtgcagttcaccaaggagccgnacaactctaca

SEQ ID NO: 467 - DNA, 263 bp, Zea mays
  misc_feature: Incyte ID No: 700156983H1
aggagcagctactcggcggcgtggacttgaactccgtgggagagacgctggagccggacgtgaagataatgagcctgtccatcctgtcgcccgggcggcccgacatcgtgctgccgctgccggtggagcccaacggcaagggcgtgtggttcaccctcaaggaaggctccccgtaccggctcaagttcaccttctccgtcagcaacaacatcgtctccggcctccgctacaccaacaccgtctggaagacggggctcaaagtt

SEQ ID NO: 468 - DNA, 173 bp, Zea mays
  misc_feature: Incyte ID No: 700156984H1
  unsure 162, 168: a, t, c, g, or other
agcaccaataaacatgcgatcgattgagttgtgtgtgcttctccattcattcacttgctctttctgcagctcgtgatcgagttgtgtgtgctccattcccaaattatgtatgatcgattagtagcgttaggggttaaccagtagccgctgtgtacttgtgtnaccctnggaca

SEQ ID NO: 469 - DNA, 261 bp, Zea mays
  misc_feature: Incyte ID No: 700156987H1
ataggttgatgcatgtaggctcttcgctgtgatactggcctgtttttcaattgaaaaaggcctgtttttgtatgcgacacagcaaaatttctaatgtttatatgctggcattttaataagtacaggctgatttctggacgtaaaatcgatgaattctgttacttgcttccactcttcattcaagttctgcttgaaacttgtggttgctgtctgttccgtcgcttgatctccaggctgtgtttttaggatgctattaaacca

SEQ ID NO: 470 - DNA, 259 bp, Zea mays
  misc_feature: Incyte ID No: 700156988H1
cggatcggccggctcctgcgtcggaattctagggtctctacctttcctttggttttatcgatgtctcttgtgtttctgtaagctagcaaacagttccagaaagcttttgttaagattttgatgacgctaagaggattgatgctactatgctgtactcaggattccatgctgcattgcgatgctaaattaaagaacctctgttaccttactttatgtgtagtgttgcagtgattgagtcctagatttgatcactgggtca

SEQ ID NO: 471 - DNA, 99 bp, Zea mays
  misc_feature: Incyte ID No: 700156989H1
  unsure 7, 54, 82: a, t, c, g, or other
agcacanctagcgcctgctccccttcgcctgtgatcatgtcttgcagcagcggnaagtgcgactgtgggctccagctgctcntgcggcagtcatgcaat

SEQ ID NO: 472 - DNA, 246 bp, Zea mays
  misc_feature: Incyte ID No: 700156990H1
  unsure 161: a, t, c, g, or other
gaaggactggtacggcaatggagcgtcgaagctgtgcgtgatctacaaccagacgggcggaaccctgcggtacgtcgacgacaaggactggctgggctacccggggccgacgccctacccgacggagatcggcaacgggcagtgggcgtccttcctccacntccacaagaccggcgcctcgtcggggtccatggccgctgtcgtctaccgcggcaaggacggcggcggcacgagcgcgacttcgcc

SEQ ID NO: 473 - DNA, 134 bp, Zea mays
  misc_feature: Incyte ID No: 700156991H1
  unsure 28, 30, 54, 85, 123: a, t, c, g, or other
cttgactttcccctcctcctcctgcgancnccttcctcgcctcgctctcatggnctcatcagagcctatagagtgccaggttgtngcgctgagggtgtcgattcactgccaaggatgcaagangaaggtgaaga

SEQ ID NO: 474 - DNA, 185 bp, Zea mays
  misc_feature: Incyte ID No: 700156993H1
acctcatcgactgcccgctccccatgcccaccaagtgcaccgatcgggtcaagttgcccgtcttctgattccgagcttctggctgtcgtttgcaattgtaaaaacgggccgggtgcagatcgatcgatacgacgatacatgcatgtttgcgtatgtgatttcgaaagcggatttgaataaatgtg

SEQ ID NO: 475 - DNA, 262 bp, Zea mays
  misc_feature: Incyte ID No: 700156994H1
gaggccttcaacgggaaggcgacgaagaaagcgcggtcccatggcaagaagtttcaggtctcgatccaacaagagacgtctcgtattctgggcaatcttggctgggcttacatgcagcagaacaacttcgaggccgccgagctggtgtaccgcaaggcgcaagctatcgagcccgatgccaacagggcgtgcaaccttgggctgtgcctgatcaagcagggcaggcacgacgaggcacggcaagcgctcgaggacgtccgat

SEQ ID NO: 476 - DNA, 265 bp, Zea mays
  misc_feature: Incyte ID No: 700157001H1
agggaaactcacaagcagcccatggtcagaattggacggtcttcaaccagagacaaagattatcgatgaccagttggtgaatattaaccagaagggtttccttacaattaacagccaacctgctgtaaatggagagaaatccgactcgcctactgttggttggggtggtcctggaggctacgtttatcagaaggcctacctcgaattcttctgcgcaaaggagaagttggaccaactaattgagaagatcaaagcattcccttct

SEQ ID NO: 477 - DNA, 263 bp, Zea mays
  misc_feature: Incyte ID No: 700157002H1
ggagaggcttgtcggcgtctctgaggagaccaccacgggtgtcaagaggctctaccagatgcaggagaccggcgccctcctcttccctgccattaacgtcaacgattccgtcaccaagagcaagtttgacaacctgtatggttgccgccactcgctccctgatggtctgatgagggccactgacgttatgatcgccggaaaggttgccgtggtctgcggataccgtgatgtcggcaaagggttgtgctgctgccctcaagcag

SEQ ID NO: 478 - DNA, 260 bp, Zea mays
  misc_feature: Incyte ID No: 700157003H1
  unsure 150, 251: a, t, c, g, or other
ctagaagcgtaaccctaagtctcggaccccaaccctcgaggaaggcgaccggagatggcggcgtcgtcggcggtggagaagctcaaggtcctctgggactcgcaggtcaacgacgaggagcagtgggcgctcaattataagctgctgaangccgctggtctgtttgcgggatccatcttcctgatgcggaacttcggtgatctgatggccatttagtaggcttatcagcgttgtttacttggatcctatgngtgttgttt

SEQ ID NO: 479 - DNA, 263 bp, Zea mays
  misc_feature: Incyte ID No: 700157005H1
  unsure 26, 87, 122, 178: a, t, c, g, or other
acctcgagcgcctcccctaccttcangccatcgtcaaggagacgctccgcctgcgcatggccatcccgctgctggtcccccacatgnacctcaacgacggcaagctcgccggcttcgacatncccgccgagtccaagatcctcgtcaatgcctggttcctcgccaacgaccccaagangtgggtgcgccccgacgagttccggcccgagcgcttcctggaggaggagaagtccgtggaggcccacggcaacgacttccgattc

SEQ ID NO: 480 - DNA, 262 bp, Zea mays
  misc_feature: Incyte ID No: 700157006H1
  unsure 107-126: a, t, c, g, or other
atcaaccacaggataattagccttgtggaaaaatggaaccactcagaaggaaccccacaggtacctttttttaaacatctgttatattgctttcgaacatctgttannnnnnnnnnnnnnnnnnnntgttaccttataaattactgtaacatataattagctctgttcgtcagttgtgctaccctagttggatattgctcaaataggacaaaaccgttgaataagatttgatacacgaagccatcaactgcagtggccaaaa

SEQ ID NO: 481 - DNA, 263 bp, Zea mays
  misc_feature: Incyte ID No: 700157007H1
aattcagtagcgatcggaccatcgcccagtatgccaaggagatatgggacatcaaggctagccctgtcgtgtgaacgagggggttgcgattcaacaccaaacgtagtttcttggggtgctataatagtaaggaagaataatgacccacggtgcttgacgcccacttgcgttgtaggcatggaacgggggcacctagcttgttctacagcgctgtctattttgaattggtgcgactttgttgctcttttttcctcccccttata

SEQ ID NO: 482 - DNA, 263 bp, Zea mays
  misc_feature: Incyte ID No: 700157009H1
  unsure 167: a, t, c, g, or other
actccaactgctcgaagaagcacttgcatctcgtaataatcataccatattgtcccttagatcggtcgaccatggcagcagcagcagccacgagactcagcggcggcggcgtcgccctcttgctcctggtgctgctggccgccggcacctccacctcgtcggcgcantctccaccggcttctactcgcactcgtgccccggcgtgcacgacgccgtcagtcggtgctgcaggccgccatcgccagggagcagcgcatgggagc

SEQ ID NO: 483 - DNA, 262 bp, Zea mays
  misc_feature: Incyte ID No: 700157014H1
  unsure 164, 255: a, t, c, g, or other
atgcggcgctacgggcagtcgctgtaccacccgcagagcccgatgacgcggtgctcaacttcctgtgcgcggtgctgctcacgctgatcctcatcaccggcgtcatcctgttcgtgctgtggttgagcctccgtccgcaccggcccaagttctacctcgccganttctccatccccgtcgccaacgccaaccggcagtccggcctggccaacctgccggtgcgcttcaccgtcaacgagcacaaccccaaccagnagatcgg

SEQ ID NO: 484 - DNA, 267 bp, Zea mays
  misc_feature: Incyte ID No: 700157015H1
  unsure 18, 32, 34, 39, 96, 158: a, t, c, g, or other
caactcgctgctgacctntcatcgacaaggcngnccgangagggcttcatcaaccccagcgcccgccgcatcatcgtgctcgcgcccaccgcgcangagctcatggacaagctcgaggagtacgagccttaccacgacagggtggcgtccacgctcanctgggagaccaccatggaccacctggcctactgacgcccacgccgccagagccgccagcagacaactgggacatctctgatccatcggtggcattcaggaaacatgctt

SEQ ID NO: 485 - DNA, 204 bp, Zea mays
  misc_feature: Incyte ID No: 700157018H1
atgcctcgccgcagctcaggaaggtctgccccacgcccagctccccgtgctgctccagtgaggaacccgccacagccagcacgccaggctcctcctccagctcctgttcgagatggtggtggctccatgtttggaggaattgggtccaccattgctcaaggtatggcgtttggcacgggtagtgcatggcacacagggctgttg

SEQ ID NO: 486 - DNA, 255 bp, Zea mays
  misc_feature: Incyte ID No: 700157019H1
  unsure 229, 254: a, t, c, g, or other
gctagatcagcggggaacaggattatccacaccgttgactccatcatctctttcgcaaattaaatctcctgcaaatcaggtggagtacctgaagcatttcagggcagataatatagttaaggatgcagaatttattcgtgtacgtcttgtaccagatgctaagccttggacagtcctaggacagagttatggtggattttgtgccgttacatatttgagttttgctccngaaggcctgaaatctgttctttggng

SEQ ID NO: 487 - DNA, 255 bp, Zea mays
  misc_feature: Incyte ID No: 700157020H1
gtatactcgcagtgcagacaccgtaaggtttcatgttgcaacacagtgaaccttgttagaccagtgaataatatagctcatgtgaactgcggccagtgccggacaactttgatgtatccatacggcgcaccttcagtaaaatgtgccgtatgcaattatgtcacagctactggagtaaatactgtggcacccaccccatctgcgaggccaacatcagatgggtcttcatatagtggctcatctacttctgctcct

SEQ ID NO: 488 - DNA, 137 bp, Zea mays
  misc_feature: Incyte ID No: 700157021H1
gtagccggagcagtagcaactttgttgaaaaatacattcatgctgtggcgtttttcttattcaatcgtaggtccttatactgctacagtgtaaatcatcattgcaatataatcaaggtttttcttttcgtcgctgtc

SEQ ID NO: 489 - DNA, 258 bp, Zea mays
  misc_feature: Incyte ID No: 700157022H1
  unsure 177: a, t, c, g, or other
agacagcatagtcgatcatgaagggtggcaagaaggaagtgcgccggtgcggtggtggccatactgctggttctgcagctcatggcagctccaccgacggccatggccgcccgctcgccgcgcggagccgtgccggatggctccctcgccacgacgcccaaggtgacgatgctgtcngccacgctgtgctacacgggggagacatgcaaatacattggctgcctcactcctgcttgctcctgcaactatagtgatcgt

SEQ ID NO: 490 - DNA, 260 bp, Zea mays
  misc_feature: Incyte ID No: 700157025H1
  unsure 11, 15, 58, 61, 164: a, t, c, g, or other
gtacgtggtcncgtnctgcgggcgtcttcaccgtccagcaagagcaaccaccagacgnacnacggtggtggtggtgctgattcttcaaccgtcgacgcgtcggacggagctgatgtcgtctacaggctgacggcagcctcccgcttcctcgtcagcgatacgancgaggcgagcacggcgaccttggctccctttgcgaggctggcgctccaccctatcgccatctccccgcacgccgtgggcatctgcgcgtggttccg

SEQ ID NO: 491 - DNA, 260 bp, Zea mays
  misc_feature: Incyte ID No: 700157026H1
  unsure 47: a, t, c, g, or other
gcagttcctttccggcctggagaagctgggcaagggcgactggcgangcatctccaggagctacgtgccgacgaggaccccgacgcaggtcgccagccatgcacagaagttcttcctcaggcagagcagcttggggaagaagaagcgccgctccagcctctttgacatggtgccgatttgcgagaacagtgcgagcatctccgatccgctgggcagcgaaggggcctcaacctctctgtcgctgaacgtgccacgccacg

SEQ ID NO: 492 - DNA, 259 bp, Zea mays
  misc_feature: Incyte ID No: 700157028H1
tttgcaaatcatccacccaaaggttcaagtcctaatgtcatgatctgcccatacgattttcctttgacagagaaggacatgagagtatacatccctaacattacgtttggtggtcaagagaccattaggatgaagaggtttggctccttctatttcaagtctggaggttctgataatcaggctggtgattctctagtactgaagacgctagtgctggtgagcacaaggtccatatgtgatgaagagctctttcttaatt

SEQ ID NO: 493 - DNA, 259 bp, Zea mays
  misc_feature: Incyte ID No: 700157029H1
  unsure 102, 201: a, t, c, g, or other
atcacgttccacatcgggaagcaggaggcggactcacactgcgggtcaacagcgccgccttctatggcgacctgcaccagctgaaaagcctgatccgggcangtgctgatcccaagaacaccgactacgacgaccgctcccctctgcatctcgcggcttccagagggtacgaggacgtcgtgcagttcctcatcaacgaangcgtcgacatcgaccttaccgaccagttcgggaacacgccgttgctggaggcggtgaa

SEQ ID NO: 494 - DNA, 251 bp, Zea mays
  misc_feature: Incyte ID No: 700157033H1
gaagacagaggccgggaaaaggagagctgagaaaaggcataggttcatggaggaatttgtggctgaattctacgaagagtggagtggcagggcttgaggttgaacaaccaggttttgacttgagcctatgtcaaagtgtgcagttggcgaaccatttctcaacaacccatgatgatgttgtctacctgggcctactttttgccgatgaagccacgcaaataaacaatggaaagcctatttagattggctgg

SEQ ID NO: 495 - DNA, 250 bp, Zea mays
  misc_feature: Incyte ID No: 700157034H1
  unsure 39, 189: a, t, c, g, or other
gcgacacaacctgctttcttgttatatgttgcgtcagcnattgtgattgtctttgtcctggtgttctatttctcccctctctatgggcagtccaatgtgttgatctacactgccatttgctctttgatgggctctctttcggttatgagtgttaaagctcttggtacatcactaaagcttacttttganggaacaaaccaattaatatatccagagacttggttctttatgcttgtcgtggctacttgtg

SEQ ID NO: 496 - DNA, 252 bp, Zea mays
  misc_feature: Incyte ID No: 700157035H1
  unsure 208, 248: a, t, c, g, or other
ctcgctcgctctccttgcaactccagtgctgctcactgccactgccagcagatcgagctgctccgtctcacaaaccctcttggctttgctgctgcacctgcaagtctgcaaccgcgcacacagagatgtcgacgacggtgagccgtgcgtccctcgaccagaagctcgccctcgccaagcgttgctcccgagaggcgaccctcgccgnagccaaggcggcacggtgggcgactatcgcctccgcgatnccca

SEQ ID NO: 497 - DNA, 250 bp, Zea mays
  misc_feature: Incyte ID No: 700157036H1
gatgaaaacccgttcggtgttgtcctgggtggaatcatagcgcaacaactctgcactactgctgccgttcttggtggaaagagcctagcgtcccagatatctgagaagatggttgaactgtcaagcggagtgctcttcctgctcttcggtatcatgtccttactctctggaccagaaggagaattgtaatccctgcttgagcctttttcagctagctgattaacatggctttctcttcttagacctatct

SEQ ID NO: 498 - DNA, 252 bp, Zea mays
  misc_feature: Incyte ID No: 700157037H1
ccctgcttccgtcacgcgagagcactccactcccacgcgaaccctagcagtggttctccctcggggccccgctaagcagcttggttccaagctgtagaagcatctccgatcccatccgcggcgggttgaggccatcagctccggtttctgcagccggatttgggatccgcgagatgtcttggtccgcgcccgacgacatcctcctctccacctccctcgccggcttcttggacaagaaacttattgtcctgc

SEQ ID NO: 499 - DNA, 251 bp, Zea mays
  misc_feature: Incyte ID No: 700157038H1
gatgagttcaaaaaattgtatggaacaacactagtgactggttttgcaaggatatgtgggcaaccagttggaattattggaaacaatggcattttgtttacagagtcagcgttgaagggctcccacttcattgaattgtgcgctcagcggcatattcctttgattttccttcaaaacattactgggttcatggtcggatcaaagtctgaagctagtggaattgccaaagctggagcaaagatggtcatggc

SEQ ID NO: 500 - DNA, 252 bp, Zea mays
  misc_feature: Incyte ID No: 700157039H1
  unsure 98: a, t, c, g, or other
agacacaggcgaaactcgatggcggatgggtccaagccggacgtgccgctgttccagctcctcagcgatcttctccagcaggtggagtcaatgagcantcaggaagaagtagagctgcgcgctaagattgaagcattaggattagaagtcactaaggtaccagagcagcccgctaatcatctcagcgagctagaaatagctgcagagttggacaagctgtcatcgggcttgataatgtcgacaagatgatat

SEQ ID NO: 501 - DNA, 212 bp, Zea mays
  misc_feature: Incyte ID No: 700157040H1
  unsure 3: a, t, c, g, or other
ganggatctgccgtctcccttgctccacgcgatgaacaccgacatcaccgcctcgactaagccggagtacccggtggtggatcggaacccggccttcaccaaggtggtcggcaacttctctgcgctcgactacatgcgcctctccaccatctccgccgtctccgtcaccgttggctacctctccgggatcaagccggggatccggggcccgt

SEQ ID NO: 502 - DNA, 254 bp, Zea mays
  misc_feature: Incyte ID No: 700157041H1
gcaacaagtacgcaggcagcgcaccttcgagccgtcgccatggcgagcaagcacctcgtcctcgccgcatgcctcctcctcctgcccaccgcctcggtcgccaccgacgtcgactactgcagtaagaaggactacccggtgaaggtgagcggggtgcagatcgtgcccgatccggtcgaacccggcaagcccgccactttcaagatctccgcttctactgataaaaccatcgagaaggggaagtggttatcgac

SEQ ID NO: 503 - DNA, 254 bp, Zea mays
  misc_feature: Incyte ID No: 700157043H1
  unsure 6, 11, 16, 61, 162, 176: a, t, c, g, or other
ggacgntgtcnccggncggcaaaggcgctctcctcccgacctccctgcggtgccggtacgncagtcgacaggatggcaatggccacatcagcatcgtaccctccacctcctccattttaccgattgtacaaaatttgagcaagatccctcatctgcaccagnacctccaccaccanttgatgaaccattcaaagccttgggtgttgattacacaggagatgttgtgattccaagcttggagagtcataatgtcc

SEQ ID NO: 504 - DNA, 257 bp, Zea mays
  misc_feature: Incyte ID No: 700157044H1
  unsure 12, 77, 168: a, t, c, g, or other
cgtgtttcctgnaccggcgagaggctcaagtcccccggcgaggagtgcaacaaggtgttcgtcggcatcagccaggngcaagctcgtggaccccatgctcgagtgcctcaaggagtgggacggcaagccgctgcccatcaacgtcaagtaaagaacgccaaggagaanaggagggaggggaggaaatacgtgaaaaaaaataaaacctgtacacgtgtatgtccagatcgtgtgtcgtcgatcgttcttcgttgttg

SEQ ID NO: 505 - DNA, 251 bp, Zea mays
  misc_feature: Incyte ID No: 700157045H1
caggatcatcctgcttgtttcaactctcataggggtttgcttgcttatgaacatgccacttaccagggacaccctcctgtactcgaatgtcaagatcgattagtttgaaggggtgttcgcggcactactcttggggttcaactttggccttgtgtatttatgggatggatttcagatggtagagacgtatgcttgtgctgttcacaaaaccagtgtacaatgtgatactaggtgctacgtgcctttctttt

SEQ ID NO: 506 - DNA, 242 bp, Zea mays
  misc_feature: Incyte ID No: 700157046H1
  unsure 19, 23, 25, 50, 52: a, t, c, g, or other
gcggcgtgtaggtggaganagananagagagtgaccctaccgggcgggananagccaggaagaggagcgcgacgatggcgtccggctggggcatcaacgggaacaagggccgctgctacgacttctggctggagttcagcgagtgcatgagccgctgccgccagccctccgactgcggcctcctccgcgaggactacctcgagtgcctccaccactccaaggagttccagcgcaggaacagg

SEQ ID NO: 507 - DNA, 273 bp, Zea mays
  misc_feature: Incyte ID No: 700157052H1
  unsure 244, 254-257, 259, 263, 268-269: a, t, c, g, or other
gcgatctggattgctgcgggcggaggggaacatttatgctcgccctgtttgtcctaggctatcggttccagtgctgctgacctctcttttggctgtataagagaggattacgcaccgtttcattttatttatactacttatatctgttattcttttaccatatgtgttctttgccatgatccccgtctatggtttgcctaagcaactttagtgaggggcagcatttgataatggcacttgaaanaaaaaaaaannnnanaaanaaaannatgt

SEQ ID NO: 508 - DNA, 274 bp, Zea mays
  misc_feature: Incyte ID No: 700157053H1
  unsure 254, 271: a, t, c, g, or other
cagggatcatcctgcttgtttcaactctcataggggtttgcttgcttatgaacatgccacttaccagggacaccctcctgtactcgaatgtcaagatcgattagtttgaaggggtgttcgcggcagctactcttggggttcaactttggccttgtgtatttatgggatggatttcagatggtagagacgtatgcttgtgctgttcacaaaaccagtgtacaatgtgatactaggtgctacgtgcctttcttttnttaatctgtgcttccanctt

SEQ ID NO: 509 - DNA, 275 bp, Zea mays
  misc_feature: Incyte ID No: 700157054H1
aattataattgtttcattcaggacgcccgtctccacgtagcctggaaggttcacgaggttcattgagccgttgagcgtgtaactgccgtgaaggttcccgaagcatctggaacacgtgggcacgccactgggcgtgtgcgctgaccctgacggcaccaaaaggagaaagaggaagcgagcccccaggaaagcggtcagaattggagtgcaagcgacgcgtcgagccccatccccttcccgcgcctcgccgagagatctgcaccgtcgtcggcaca

SEQ ID NO: 510 - DNA, 273 bp, Zea mays
  misc_feature: Incyte ID No: 700157055H1
  unsure 172, 182: a, t, c, g, or other
gatgaatctatctctgtacatgcgttggtggatggtggtgtaacatagtggctgccaacaagtcatgctcatgcaaaccgatgaatctatctctgtatcatcgatctcggttgcttgctagtccagactccagacatggctatatatatatagctggtgctaataaataggngtataatcgncatatcgatcggttgcgtgtggaatgccaatcatgtgtgtaatctgttggcaaataacaaacctctgttcctccctgctgctgttgtccgg

SEQ ID NO: 511 - DNA, 275 bp, Zea mays
  misc_feature: Incyte ID No: 700157057H1
gcggttctttgaagattataagaagaatgagaataaagaggttgctgtcgatgcattcttgcctgcgaccacagctcgagaggccattcagtactccatggatctgtatgcgcagtatattttgcaaagcttgaggcagtagattggaagcaactatttatctgggcgtcttggaatgagtgtgattttaataagtcaaaacacttgatattgtgtgcaaatcttggggttgagaacaatgtcactagctgtgatttacttctgtgactgcattt

SEQ ID NO: 512 - DNA, 276 bp, Zea mays
  misc_feature: Incyte ID No: 700157058H1
atcaacgacttcaggcaagcagcaagacaaaactcaggctgtctcaccaaacccaaccctgcaaggagtgcaagaaccttccggcatcatggccttcaagttcatcctgggagttgccctgctgtctgtcctaatcggcgtgtttcttgggaagcggtactagcgctcaggtcgtgctgaaagggctcagccagcggcaagtttgaaaggattggtggccttgatggtaatggttcgacgactttctgggagaagggctcatcggcgtgtttcttt

SEQ ID NO: 513 - DNA, 275 bp, Zea mays
  misc_feature: Incyte ID No: 700157061H1
gttcgttccgtacgagggtgacaccgtgtccgggaacttcgtcgttgtcgaccacgacatcttctggagctccgatcacccaggcatcgacctcacggtaacgtcaccaggtggtaacactgtgcacacattgaagggaaaatctggtgacaaatttgagtttaaagctccgaaggtggcatgtacaagttctgcttccataacccatatggagcacctgaaactgtttctttctacattcatgttgggcacatacccaatgagcacaatctggg

SEQ ID NO: 514 - DNA, 93 bp, Zea mays
  misc_feature: Incyte ID No: 700157063H1
  unsure 27: a, t, c, g, or other
ctgcaaatggcgaaaagtgtgcttgtntcttgcccgtctgtattgtatcgaactttgagcgaatgtttcagtttgctgcatcatttgtttgtc

SEQ ID NO: 515 - DNA, 269 bp, Zea mays
  misc_feature: Incyte ID No: 700157065H1
  unsure 118, 255: a, t, c, g, or other
aagaagcctcagttttggcatccagcagcaactggccatggaaagcagtgggatcggcagagtggcccccctggaggccgtcctcttcgacatcgacggcaccatggccatctccganccgttccaccaccgggccacctcggagatgctcctcaaggtgggatacaacaacggcgtgcccatcacgcccgagttcggcatggcgaacatggccggccggagcaacgagcagatcggccgcttcctgttcccggnctgggaccagcgcc

SEQ ID NO: 516 - DNA, 265 bp, Zea mays
  misc_feature: Incyte ID No: 700157067H1
  unsure 51-53, 56: a, t, c, g, or other
ccatcgccttcttcgtggcccgcgacatcaggaaacggcgccgcgtcgcgnnnggngccactggaagatgacgcctttcgtcgtggatcttggtttcggggaggagtccatactccggggcctgacggaggccaacatcgtcggccgcggcggttccggccgcgtgtaccgcgtcaccttcaccaaccggctcaacggggccgcagcgcggtggccgtgaagcagatacggaccgccgggaaactggacgggaagctggagcgcg

SEQ ID NO: 517 - DNA, 265 bp, Zea mays
  misc_feature: Incyte ID No: 700157070H1
gaagcatttgcctgaggatccacttttccaattggtgtccaagttgtatgaagttgtacctcctatcctcactgagctgggcaaggtcaagaacccatggccaaatgttgatgctcacagtggagtttttgctgaaccactttggactatctgaagcacggtattacactgtcttgttcggtgtttcaagaagcatggggataggatctcagctcatctgggaccgtgcccttggcctgccacttgagaggccgaagagtgttac

SEQ ID NO: 518 - DNA, 267 bp, Zea mays
  misc_feature: Incyte ID No: 700157071H1
  unsure 81, 180-199: a, t, c, g, or other
acggcggcgacatgttcgagcacatcccgtcggctgacgcactcatgctcaagtggatcctgcacgactgggatgaggacnagtccctcaagataatggagcgctgcaaggaagcgatcggtggcaaggaagcaggggggaaggtgattataatagacacggtgctcggatctcgggcannnnnnnnnnnnnnnnnnnngacgtgcagggagacgtatgtgttggatctccacatactgagcttcgtgaacggggcggacgggagga

SEQ ID NO: 519 - DNA, 266 bp, Zea mays
  misc_feature: Incyte ID No: 700157072H1
  unsure 196: a, t, c, g, or other
ccgcgttctacactgccgtgccgaggcctgccaccgtgtcgcgctcctggctcgtcttcctcctcgaccaggtgttcacgtacctgatcctggcggcgggcgcacggcggcggagtgctgtacctcgcctacaacggtgacaaggaggtgacgtggagtgaagcttgcggcgttttcggcagcttctgccgtcagngcgcacctccgtcgccatcaccttcggcaccgtcctctgtttcatcctcctgtccctcatctcctcgtag

SEQ ID NO: 520 - DNA, 267 bp, Zea mays
  misc_feature: Incyte ID No: 700157073H1
caccttttctagcataatgtggaggataagtggatccaacatatgtatgaatttcacaaatataagtactatctgttccaaagtaaagttcaaataaatgtaccatcaagacatatttcatgataactgaatgggactgatttgatgctgtagatgttggcacattttttctaacttggtcaaagttaaagaagcttgactaagaacatagataaagtgagctataatttgtaatgaagggagtaggtccagcttagtgcatttcct

SEQ ID NO: 521 - DNA, 268 bp, Zea mays
  misc_feature: Incyte ID No: 700157076H1
  unsure 213, 221, 256, 264: a, t, c, g, or other
gtggaaacctcgaccgatctgtccgatctctctcccgagtccactccaagccttttcgccttttcctccgccttctcgcgatggcgccgccgcgccgcgctctactcgtcctcgccgctctcctcctctccctctcccttggggccgcctccttccattccgacgagctcctcctcaacgatgacgaagagttcgagggcgtcgtcgcccgcncctccganccctccccgccggcggccccggtggtctcctcctncccgccgngata

SEQ ID NO: 522 - DNA, 179 bp, Zea mays
  misc_feature: Incyte ID No: 700157078H1
  unsure 160: a, t, c, g, or other
aaagggaaaggtgtatcgtctatacatggatccatgccgaggaaggagttcgtcaaggaggggctccattgctgctggagctggacatggtcactttgatgcagacgacgatgcagcagcactagttcctcctccttaccgcctgttcccggagccggangagacggccgcccgagaca

SEQ ID NO: 523 - DNA, 269 bp, Zea mays
  misc_feature: Incyte ID No: 700157079H1
  unsure 253: a, t, c, g, or other
atcatttttcctcttgctttattataaacttcctctgcggccagaaactcacaagacatactatgaatacactggcttgtggcacatctatgggctccttgccatgaattcatggttctggagtgccatatatcacagttgtgacacaatttggacagaaaagctatatttttcatcagatgctgcctttctagggtattccctcatgttgacgatagttggtgagcatgtagtagcaagtttcatgggctcnggtagattaactgacc

SEQ ID NO: 524 - DNA, 273 bp, Zea mays
  misc_feature: Incyte ID No: 700157080H1
gtttctcaaagtcaacaaggctactattaacatgctacgcagggttgagccatatgttgcatatgggtacccaaacttgaagagtgtcagggagttgatctacaagaggggctatggaaagctgaacaagcagaggatccctctgtccaacaaccaagtcatcgaggagggcttgggcaagcacaacatcatctgcattgaggatcttgttcacgagatcatgactgttggcccacacttcaaggaggcgaacaacttcctgtggccatcaag

SEQ ID NO: 525 - DNA, 260 bp, Zea mays
  misc_feature: Incyte ID No: 700157082H1
cgatgataaccttgaacagggcagaagcaaggggaatgttactgtcaccaattcctatgaatatttccattgccaggatgtgacagttgccgttgcactgccatctaacggctcagcagtggtatccagagcaaacttggcgaacacgatgagcgggattctgtatcggagcattctgcgctgcatgctgtccctgaaaaactgcaagactcttctgatttccagcctcaaagtggctataccataagcgccagttcaaa

SEQ ID NO: 526 - DNA, 170 bp, Zea mays
  misc_feature: Incyte ID No: 700157084H1
  unsure 130, 132-133, 135, 137-138, 140, 145, 150-151, 153, 155, 159-161, 165,168-169: a, t, c, g, or other
ccttttactagtgtcgatgttgatctggtataccttgctatgaactggttaaagtttgtgctggtttgggattttttgtgcatcttgtgatacctcaagtcttcatcatttaaatgtttagccgtaaaanannanannanaaaanaaganngnanaagnnnaacnggnna

SEQ ID NO: 527 - DNA, 260 bp, Zea mays
  misc_feature: Incyte ID No: 700157086H1
  unsure 162: a, t, c, g, or other
atagtattcacttatctttcagacggtctgtagtaggaatgtgcatttggtatagttcttgtctgaagtcattgtggtgcgcggacggtccgctggaaggaaccgaacggtccgaagccaagtggtattttcaaaaagagctcccggacagcccgcactagngcctcggactgtccatgatgtgttgtttttaagggttgatcttcttgaagaatgttttgagtacctgattcataacttagcaaactagttagtcttaa

SEQ ID NO: 528 - DNA, 261 bp, Zea mays
  misc_feature: Incyte ID No: 700157087H1
tacaagaacagcattcaaggaacaatcccttctgagcttggtaatttgaagaatctaataagcttggacttgtacaagaacaacatttcggggacaatacctccttcccttggaaagttgaaatcccttgtattcctgcggctcaatggcaatcatttgactgggccgatcccaagggaactttctggaatatctagtctcaaagttgtcgatgtttcaagcaatgatttatgtgggacgattcccacatctggaccattt

SEQ ID NO: 529 - DNA, 261 bp, Zea mays
  misc_feature: Incyte ID No: 700157088H1
gctgaatttacagcttctctagttcatctcaatgttgagcatggggacggtcagcttgatctaaatttggagcgattgcggatggccattgaggatttgcttgttaagttggccaagatgttttccaaaccgaagctacaaactgtctttctgataaacaactatgatttaacaatttccattttgaaggaagctggaactgagggtgggaaagcacaacaacacttcgaggaggttcttaagagcaacatcgcaatatat

SEQ ID NO: 530 - DNA, 260 bp, Zea mays
  misc_feature: Incyte ID No: 700157089H1
caggatgtccttaaggcggcgctgagcgccatgtcttctgtgacggagacactgaacatcatgacctcatcgtccaccggccagactgcactgtgactcgtttggtgccgttttgtggtgcggatcagaatccccactttttccatggtgtcgattgacaaagttaggagcagtaatcctgtggtgcggatcagaatccccactttttccatggtgccacacgggtcattcttttgtagcttcttgggagagttctatca

SEQ ID NO: 531 - DNA, 259 bp, Zea mays
  misc_feature: Incyte ID No: 700157092H1
aacccaccgagcttggctattatcttccagctcgcatttgcaccgatgatgggccggaccactgacctggctgtggttgagcagaatgaagcgaacttgcgaaggtgcttgatgtgtatgaccaacggctgggggagagccagtattttgctggtgatgatttctccctggccgaccttgtgcacttgcccaatgcagatttccttgtgaacagaaccagcaaggctggcttgatcaccgagagaaagaatcttgctag

SEQ ID NO: 532 - DNA, 264 bp, Zea mays
  misc_feature: Incyte ID No: 700157093H1
  unsure 68, 226, 237: a, t, c, g, or other
ctcctccgcgccggccgcaagaggttcaagcgcgcgggttcgtcttccaacgcctccaaggcgaagcncctgcccctcgagctcgagggcaaggccggcaacaacgaacgcgcgtcgcccagccctcccccgacgcaacaacgagaggcggaggagctgcagccggtgccgatggtcgtcgagccagaacacggcgaggagtccgccggcagccacgaccaccacntgcagcttcangggttgtcggaggaggacaccgacgtg

SEQ ID NO: 533 - DNA, 261 bp, Zea mays
  misc_feature: Incyte ID No: 700157105H1
  unsure 49: a, t, c, g, or other
gtgaccagttgcgcggcggacatttggccttgagcttcaagccattganctgattcaaagcttgctccaccctcaaaaaaaggaccagagtttgtcaactcaaatagctggtggcttgagcagagcttctggcacgagttctcttgaaccatatttccacataagctttataggatgcatcactcttttgatgtcacttagtttcaagtataaaatgaagctgtctttgtacaaagctgcaaatgagaagtaaatgaaacg

SEQ ID NO: 534 - DNA, 248 bp, Zea mays
  misc_feature: Incyte ID No: 700157106H1
cacctatgagaatactgaaggatgcacccagtggaccatcccagctgttccgacggttggtgatgctagggatgactggaagatcatccgcgctctttctgaggttgctggggctcagctgccttatgacagcctctcagctgtgagggaccggatcagtacggttgcaccaaatctagtacatgtagacgagagggagacacccacaatctctgcggaggttaagccgcctgtgaagcaacaagtca

SEQ ID NO: 535 - DNA, 257 bp, Zea mays
  misc_feature: Incyte ID No: 700157109H1
  unsure 2, 88, 94, 169, 172, 181, 238, 240, 250, 256: a, t, c, g, or other
angtcgttcactccggcaacgacaggtcagtagtggttttgtcttttcgatccaccattgagactgataacaagatcattcaccagcncatttntctgtctttctttccagtggttcttcagtggctggtttggaggaaatacttcgagtggcgcatctgggcgtcctnggngcccatcgngggaggaatccttgtcacctccgtgacggagctgagcttcaacacggctggcttctncnccgcgctggnggggtnc

SEQ ID NO: 536 - DNA, 257 bp, Zea mays
  misc_feature: Incyte ID No: 700157110H1
  unsure 156, 181, 190, 194, 214, 232, 236: a, t, c, g, or other
atgaattgaagaggagtcctcatcatcacatcataagggagcagcagtagatttaattgcaaaattaaagacacccgcgatgcatgccctatcactagttttgttccaccggtacccctaccgcgcgtttcttttaagatttggttccccatttanctggggacagtagaccccagatganacctatgtntgcngtttcattttcagttacgtncgtctccgcatgcatgtntgcncttggatctgatgtaacccca

SEQ ID NO: 537 - DNA, 101 bp, Zea mays
  misc_feature: Incyte ID No: 700157111H1
gctgaactctccagctatggtcacagatttctgtatgtctcttatgtataagctatggtaataatgttatgctacatggtatgggcttgtgaaccgagact

SEQ ID NO: 538 - DNA, 257 bp, Zea mays
  misc_feature: Incyte ID No: 700157113H1
  unsure 10: a, t, c, g, or other
tttctctatnggtatattttgtatgccaccttcttcagttattccacttcataatcatcctggaatgacagtacttagcaagcttctttatggaagactgcatgctgagtcttatgactgggttgatgtacctgatcatcctattgatcaattgcaaccaaggccagccaagcttgttaaagattgtgaaatgacggctccagagacaactattctataccctaatgcaggtggtaacatccacacattcagagcca

SEQ ID NO: 539 - DNA, 262 bp, Zea mays
  misc_feature: Incyte ID No: 700157116H1
  unsure 13, 24, 76: a, t, c, g, or other
gttcctgattgcnttctcatatgnactttccaagaaggaaggtaaagttgggacaccggagcgccctctttctgancttggcctgctcagctatagaggttattggactagagtgcttctggaaattctaaagaaacataagggtaacatatctataaaggaactcagcgacatgacggcaataaaagccgatgacatcttgagcacgctgcagagcctggacctaatccagtatcgcaaaggggcagcacgtcatctgcgg

SEQ ID NO: 540 - DNA, 257 bp, Zea mays
  misc_feature: Incyte ID No: 700157117H1
  unsure 16, 149, 176, 243: a, t, c, g, or other
cagggtgtcgtcggcngtgtccaagaccgtggcggcgccgatcgagcgcgtcaagatgctgctgcagaaccaggacgagctgatccggaccggcaggctgtccgaaccgtacaggggcatcggcgactgcttcggccgcaccgtcaggnacgagggcttcctgtcgctgtggcgcnggaacaacaccaacgtcatccgctacttccccacgcaggccctcaacttcgcgttcaaggatattcnagggctcttcaact

SEQ ID NO: 541 - DNA, 257 bp, Zea mays
  misc_feature: Incyte ID No: 700157120H1
  unsure 26, 55, 76, 88, 174, 178, 241: a, t, c, g, or other
caccccaataccgccttccacctggncgctctccccagccgaccctaccctcgcnaccgccgcttcctacctcgcngcctcgcttgcntcctgctcctccctcccgcatctccgcgcccttctcaccacctttatcaccactctgtcacaatcactcgcactcccaaccccgcnggcngccctccccgccgccatccgcgctgtcgccccttacttccccgccgcaatcgcctcccttgtngcctccaaggcggtaa

SEQ ID NO: 542 - DNA, 255 bp, Zea mays
  misc_feature: Incyte ID No: 700157121H1
  unsure 138: a, t, c, g, or other
ctgatgttgctactacattcaatggcatcatccgagccttaagggagaaggaatccaagttgaaggcttcaaggatgcacatttatgtccgccgaggtggtccaaactaccaatctggactggctaaaatgcgtaacntggtgcagaactcggcgttccaattgaggtgtatgggccagaagcgactatgactggaatctgcaaacaagcaattgaatgcatcatggctgcagcgtaatcagagcgtactccggg

SEQ ID NO: 543 - DNA, 256 bp, Zea mays
  misc_feature: Incyte ID No: 700157122H1
  unsure 49: a, t, c, g, or other
aattgatatcttatttaatggacagacacataggataaagaagtttgtnttgcatacaaacttccctggccactcagatttcaattcatataagaaatgcaactttgttatatacgacgctgaagctgaaggtacatgtcagcctaataatgcctcaaaaaattgcataacacctagtacaaaatgggaacaagtcaaggagatcctcggtgactgtggccgagctgcaatccagacacaaggctccatgaacaat

SEQ ID NO: 544 - DNA, 126 bp, Zea mays
  misc_feature: Incyte ID No: 700157124H1
  unsure 51: a, t, c, g, or other
ggctctttcttggccctgtactgtactattaatgttccgttcttgtttttntattcggaattgtcgccgtttcagtatacgtaaatctcgaggtcgataatacagtaatactaccaatttaactgt

SEQ ID NO: 545 - DNA, 255 bp, Zea mays
  misc_feature: Incyte ID No: 700157127H1
  unsure 9, 14, 71, 172: a, t, c, g, or other
cacagcagnaaganccggtggggggagctggaggaggacgatggcggggacctcgatttcctcctcccgcnccgcatcgtcgtcggacccgacgagaacggcctcaagaaggtcatcgagtaccgcttcgacgacgacggcaacaaggtccgggtcacgaccaccacccgcntccgcaaactcgctcgggcgcgcctctcccgcagcgccatcgagcgccgccagtggcctaagtttggggacgccctcaaggag

SEQ ID NO: 546 - DNA, 254 bp, Zea mays
  misc_feature: Incyte ID No: 700157128H1
  unsure 12, 24, 26, 45, 69, 163, 195: a, t, c, g, or other
cagacgttcganaccaaccgcacngngctggtggggctgtatcangagacctccatgctcaccttcganggccagaagttccagggcccatccgccattgccggcaagctcggatctcttcccttccaggcctgcaagcaccagatcgtcaccgtcgactgcnagccgtcggggccccagggaggcatgctcgtnttcgtctccggttccatccgcaccggccccgaggagcaccccatcaagttctctcaggc

SEQ ID NO: 547 - DNA, 256 bp, Zea mays
  misc_feature: Incyte ID No: 700157129H1
  unsure 5, 8, 36, 45, 47: a, t, c, g, or other
catgnatnctacctatatcctgaaggcctaaagganctgcttatnancatgaagaacaaatacggaaacccacccatctacatcactgagaacgggatgggtgacgttgaccatggcgatctacccatggaagttgccttggatgaccacaaaagagtacattacctccagcgccacatcgcaactcttaaggagtcaagagacttgggagcgaatgtgcagggctacttcgcttggtctctattggacaacttcg

SEQ ID NO: 548 - DNA, 252 bp, Zea mays
  misc_feature: Incyte ID No: 700157130H1
  unsure 11, 54-56, 61, 68, 79, 95: a, t, c, g, or other
catcgccggancaggaggaagagcgaggagcaacatgtcgtggcaggcgtacgnnnatganaactgcngtgcgacatcnaaggccagcacctcancaccgccgccatcgtcggccacgaggcagcgtctgggcacagtccgagaacttccccgagttaaagcctgaggaggttgctgggatgataaaggacttcgatgaacctggaactcttgcaccaactggtctttttgttggaggtacgaatacatggt

SEQ ID NO: 549 - DNA, 252 bp, Zea mays
  misc_feature: Incyte ID No: 700157131H1
  unsure 2, 15-16, 20, 31, 40, 48, 57, 70, 81, 90, 109, 114, 127, 137-138, 165,206, 215, 224: a, t, c, g, or other
cnccaagaacctcgnnggcncccagcaggcnctgttcganaagaagcnccggaaccnggcggcgctcgangagggcaagcncatccccancgagctccgcaacgaggancacgncctgcggaggcanatcgacctcnnggaccaggagcgtcaagttcccaagancatcgttgactacgagtacgctactgccagcattcgggagncctagatanatgaccatnctgcaatcctagggcgccctaacctcag

SEQ ID NO: 550 - DNA, 203 bp, Zea mays
  misc_feature: Incyte ID No: 700157132H1
  unsure 12, 21, 82, 86, 89, 112, 137, 145, 149, 176, 187, 192: a, t, c, g, or other
ctttcttcctgncgcacggcncgcccacgctctccatcgacgacaacatcccggcgcggcacttcttcaagtcatgggtgcnggcnaangtcgcgggcgaccagcccccgcncgccatcctcgtcgtgtcgggacantgggacanggcnacgccggaggtcaacgtcatccgcggnagcaacgacanattangactttatggc

SEQ ID NO: 551 - DNA, 250 bp, Zea mays
  misc_feature: Incyte ID No: 700157133H1
  unsure 213, 217, 222, 233, 236, 239, 243: a, t, c, g, or other
gccgaggaaggtcgacatgtcgtctccgccgccgccggtgaagctgatcggcttcttcggcagcccgtacgcgttccgcgcggaggcggcgctgtgcctgaaagcgtgccgtacgagctgatcctggaggacctgttcggcagcaagagcgagctcctgctccaccacaaccccgtgcacaagaaggtgcccgtgctcctccacggcgacggnaggnccatntcggagtcctngtnatngcgnttaagtg

SEQ ID NO: 552 - DNA, 163 bp, Zea mays
  misc_feature: Incyte ID No: 700157137H1
ataggcacacctggagtttctggttagtggcaggccgtcacgttcgacatttcagcctccatgttcctgatatttacagacagttataatgcaaaaggcgacattattttcattcagctgttaagttgggaaaaaacaacctgcttcgtatattagtcccatg

SEQ ID NO: 553 - DNA, 250 bp, Zea mays
  misc_feature: Incyte ID No: 700157139H1
  unsure 125: a, t, c, g, or other
gcggcgcatcatgaccgtccccttcttcaccaacaaggtggtggcccagaaccgcgccgggtgggaggaggaggcccggctggtggtggaggacgtgaggaaggaccccgaggccgcggccggcngcgtcgtgctccgccgccgcctccagctgatgatgtacaacgacatgttccgcatcatgttcgaccgccggttcgacagcgagcacgacccgctcttcaacaagctcaaggcgctcaacgcggag

SEQ ID NO: 554 - DNA, 247 bp, Zea mays
  misc_feature: Incyte ID No: 700157141H1
cacctctcctccggctagggtgttcacgcctgccgcggcgaacttctgccctccccggcgtcgcgctctggtcgtcgtcggccgggaagatggctggcggcttcagggtacttcatctggtcaggccctttctggctttcttgccagaggtgcagagcgcggataggaagataccattcagagaaaaagttatctacactgttatttctctcttcatttttctggtgtgcagccagctcccactcta

SEQ ID NO: 555 - DNA, 126 bp, Zea mays
  misc_feature: Incyte ID No: 700157142H1
gctttgctgtagacgtaggcgatgtaaaccgtcctttttgattaattctagtatgttctgagactgggtttatattgtaatttgaggataattatatgatgctctaagtttattgatattcctgtc

SEQ ID NO: 556 - DNA, 236 bp, Zea mays
  misc_feature: Incyte ID No: 700157143H1
agagaatctgaaccttgccggtgtggatcggatctatgtgtgcactgcaatctctcccaccactgtctacatgatgcactgtgctctccgtctaaaaaggtcaggtacatctattcctaggatggagctggtcgaagttggaccttcaatggatctggttgtaaggaggcacagacttccagctgaaagtttgaagaaagaagctatgaagaccgctgaacatgctaagaagatga

SEQ ID NO: 557 - DNA, 247 bp, Zea mays
  misc_feature: Incyte ID No: 700157144H1
cactcccacacagaactagagctccaaggccatggagaaatggagaagacgcaggcacttgctgcttgctgttgcagccgtggccctggtggcagcaataacgctgccgtccgcggaggcgaactgtccccggactactaccggtcgacgtgcccggacgtggaggcaatcgtgcaggcagtggtggccaagaaggtgaatgagaccttcgtcacagtcccggccacgtcaggctcttcttccacga

SEQ ID NO: 558 - DNA, 250 bp, Zea mays
  misc_feature: Incyte ID No: 700157145H1
  unsure 241: a, t, c, g, or other
gttcccctctcctgatcgtcctgttcctcacagcagcagccatggcggccgagccggagaagcaggcggcccccgcggcacaggagacggccgtgcacatcgtgtacgttgaccgccccgaggacgccgaccctgaggagttccacatccgcaccctcacccccgtcctcggcagcgaacagaaggccagggacgcatgctctaccactacaagaacgccgccagcggcttctccgcgaantcacccccc

SEQ ID NO: 559 - DNA, 251 bp, Zea mays
  misc_feature: Incyte ID No: 700157147H1
  unsure 244: a, t, c, g, or other
ggcaggagcagccgcagtcccggcgatcccgccgccggtcgccctcacacctcctcgtcactgccttcgtttctctttccaacaatcaagatgagccgtggcggtaggcgggtggtggtcaaagttctctgggttacctctttggaagcggtgagccccccaaaccagcagtggcaccaccagctgtaagtgctccacctgctgctgcagtgctccacctgctgagaaaccacctgctgcaaancctgatg

SEQ ID NO: 560 - DNA, 158 bp, Zea mays
  misc_feature: Incyte ID No: 700157149H1
  unsure 71, 83, 138, 143: a, t, c, g, or other
gtggttgtgggcttgtacacctgccgccagtcgtcgatcttggctacccctcactcaggaagaactgtttntctttacctgangaaacaagaccacaggcagtggccctcgctccctgcttgctcaaaagcccacagncattnacattactttgacgc

SEQ ID NO: 561 - DNA, 268 bp, Zea mays
  misc_feature: Incyte ID No: 700157153H1
gtcattgatgaagatggttggttgcacactggagacataggtctgtggctacctggaggacgtttaaagatcatcgataggaaaaagaacattttcaagttagctcaaggagaatacatagctccagagaagattgaaaatgtctatgccaaatgcaagttcattgcccaatgttttatatatggcgacagtttcaactcttccttagttggtattgttgcagttgaaccagaggttatgaaggcttgggctgcatctgaagggatcc

SEQ ID NO: 562 - DNA, 270 bp, Zea mays
  misc_feature: Incyte ID No: 700157154H1
cgcgtgttcaacgagggcatgaagaaccactcggtgatcatcaccaagaagctgctggacttctacacgggcttcgagggcgtgtcgacgctggtggacgtgggcggcggcgtgggcgccacgctgcacgccatcacgtcccgccacccgcacatctccggggtcaacttcgacctgccgcacgtcatctccgaggcgccgccgttccccggcgtgcgccaacgtgggcggggacatgttcgcgtccgtgcccgccggcgacgccatctt

SEQ ID NO: 563 - DNA, 267 bp, Zea mays
  misc_feature: Incyte ID No: 700157157H1
cgcagaagaggatcagcagcagtgaccaatttatcatcctcgctaccgacggggtatgggacgtgctctccaacgacgaggcggtacatatcgtggcggggacgccggaccgggcgaaggcggccaagcggctggtggagtgcgccgttcgcgcgtggaggcgcaagggcgcgacatcgccgtcgatgactgctcggcgatctgcctcttcttccacccgccgccgccgtcgtagacacgaaaacctgtaacgtgccgaagtccacg

SEQ ID NO: 564 - DNA, 267 bp, Zea mays
  misc_feature: Incyte ID No: 700157161H1
gtaaaaaaaaaagattgatttcatactgttttataacatgtgtaactaactgcacccttaaatattattggtcagcaaaaatattggatatttaacgagtaccgttgaatagcccttggcggtcaggacctcgttagatgggaaaaatatattacaggtcgcaatacattatggattgagaggaattgaaggggtttcaatcactagcaagtcaaaatctcctccaatctgtatcaatcccctccaatccatatgtattgaaaataa

SEQ ID NO: 565 - DNA, 266 bp, Zea mays
  misc_feature: Incyte ID No: 700157162H1
  unsure 191: a, t, c, g, or other
cttttcccctgtaaatcgcaaattcgtcttccctgcccatctatcgcttggacacctctgcaagggagcacatggctctcgagaaggccaaggagatcatcgcgtcctccccggtcgacctagctctccgaaaggccaaggagaccgtcgcctcccaccccgtcgtcgtcttcagcaaaacttactgtccnttctgcacccgagtgaaacaattgctagcaaattgggggcaagtttacaaggctattgagttggatgtggaaatg

SEQ ID NO: 566 - DNA, 267 bp, Zea mays
  misc_feature: Incyte ID No: 700157163H1
  unsure 258: a, t, c, g, or other
attttctgacattgaaaaaatctgtccgaaacattgcatacttgcgacaaacacatccaccattgatttgaatgttgttggcgagaagacaaattctcaagatagaattataggggctcactttttcagccctgctcatattatgcccttgcttgaaattgtccggacggagaagacatcaccacaagctatccttgatctcatcactgttgggaagataataaagaaggtccctgttgtggtcggcaatgcacaggntttgcagtc

SEQ ID NO: 567 - DNA, 206 bp, Zea mays
  misc_feature: Incyte ID No: 700157164H1
gcctgcagccctccatccacgaactcccgttctccatttccagccatggcggtgtcgatcgagctcaccaaggagtacggctacgtcgtgctggtgctggtggcctatgtcttcctcaacctttggatgggcttccaggtcggcaaggcccgcagaaagtacaaggtgttctaccccaccatgtacgccatcgagtcggagaacaa

SEQ ID NO: 568 - DNA, 143 bp, Zea mays
  misc_feature: Incyte ID No: 700157165H1
  unsure 8, 26, 61, 73, 86, 96, 130, 135-136, 141: a, t, c, g, or other
cctccatngaatcttgtaggcaaagncaataatcaatcaccagcgacatcaattccttgcncggtcgcgcgtngaggaaccgcgcngcacagttcnagttccatgggcaaggtgcgctccttcttctgcngcgcnngcagngg

SEQ ID NO: 569 - DNA, 263 bp, Zea mays
  misc_feature: Incyte ID No: 700157166H1
aaaatatccttgtacctgcatctcgacctcaccggcgtccggcggtggtatcacgatggtggcgttgctgggccggcggatcggggtggctgcggcagtgccgcgttcatcgccctcgtggcgttcggatccgcctcatcctcgcccaagtccttcgtgaagtccaccgtctccgcccacgacgtcgtcatcttctccaagtcatactgcccgtactgcaaaagagcaaaggccgtgtttaaggagcttgagttgaagaaaga

SEQ ID NO: 570 - DNA, 261 bp, Zea mays
  misc_feature: Incyte ID No: 700157167H1
agtttgtgaatcctaaagtgcaagcttcaattggtgctaatacatgggtggtcagtggaactccacagacaaagaagctgcaagatctgcttccgtccattatcaaccagctcggccctgacaacctagacaacctgcggaggcttgcggacaattccagaagcaggcccctggtgcttcaggtgcagaggctggcgccagcgctggtgctgctcaggacgatgacgatgacgttcctgagtcgtccctggagagacattt

SEQ ID NO: 571 - DNA, 166 bp, Zea mays
  misc_feature: Incyte ID No: 700157169H1
  unsure 126: a, t, c, g, or other
gcgtgaatgttgataataacaggtcagtatgtgaggaaggtttatttggttggaacggtgcattcgtgtcgtgttaatccagcaaatcctgtgtaggttaagtaacaaggcttctgtgctgttaanaatattttactatgtcatttctttggacggttttctgaac

SEQ ID NO: 572 - DNA, 175 bp, Zea mays
  misc_feature: Incyte ID No: 700157171H1
atcctgtcaactgcacccgccattatccatggtcgctcgctcctcgcctgcgtctcctggtcctggggttcgtctgaacgtcctcgcggcttcacgacggcgatgccgcctccgtcgatcctgtccgtctcgtgccggatttaatattagatctatatgcgtgtttttctgcgtt

SEQ ID NO: 573 - DNA, 265 bp, Zea mays
  misc_feature: Incyte ID No: 700157172H1
  unsure 46: a, t, c, g, or other
gcaagcaaaaggaagaaccagctgctgcggccggagatgtcgtcgnagctgatcgaggagcaccggtcgggcgcggaggtgcacgtcgggcacgagctgtgcgagcgcaagtcgcgcgagttcatggtggagctgggcctccccgacgggctcctcccgctgcccagcctggacgaggtgggctacaaccggtcgacggggttcgtgtggctgcggcaggccgccggcctgacccacaccttcggctccatcggcaagcaggtgt

SEQ ID NO: 574 - DNA, 165 bp, Zea mays
  misc_feature: Incyte ID No: 700157174H1
ctaatatttggattataatttttagctatgttggtaactacttctggacacattacttcttcacagttcttggcgcgtcatatacttttccatcatggaggatgaataatgtacctcatacgacatttctcctgacccatgcttgtttcctgttctatcatatgg

SEQ ID NO: 575 - DNA, 125 bp, Zea mays
  misc_feature: Incyte ID No: 700157176H1
ggccgccgcgcgagcttgggttagtgtctcttctaagcggagacctgtgagaggagccatcatcatggccgctgttgagactgttgtcctcaaggttgctatgtcatgcgagggttgcgccgggg

SEQ ID NO: 576 - DNA, 262 bp, Zea mays
  misc_feature: Incyte ID No: 700157177H1
  unsure 139, 186, 213, 240, 252, 255: a, t, c, g, or other
gcaaattaaggacgctctgcacacgtactattcatcttccattgttggtttgctttgcttaccggcaaccatggccagcactcgtgcagcagcaactctccttttgctcctcgcgctcgccggcacctcgtcggcgcantgtccacgggcttctactcctactcgtgccccggcgtgtacggcgcngtcaagtcggtgatgcagtccgccatngccagggagaagcgcatgggggcttcnatcttcggcttnttnttcaagg

SEQ ID NO: 577 - DNA, 102 bp, Zea mays
  misc_feature: Incyte ID No: 700157180H1
  unsure 32, 95, 98: a, t, c, g, or other
cgatgtattcccagttttgaaaatggattatnaataccatccataccattcccgatggtttaaaaccaaaattttgggaaaagaataatatttcnttngacc

SEQ ID NO: 578 - DNA, 258 bp, Zea mays
  misc_feature: Incyte ID No: 700157181H1
caactaagcaagtccaatgtctcatgcccagccccttcgtttacaggcccagtggaaacacgtcgatattcaggataaccaagccaatgctatgaaggaaccaggaaccagtggtgggtatggctccccaatgaaagatgacaagaacaaggatgtggatacaatagcttcgaacttcatcaagcttaagcacagggcttgggcactccagaagagcacaaccatgtaccaaccttccacttaaaggtgttgctagtt

SEQ ID NO: 579 - DNA, 257 bp, Zea mays
  misc_feature: Incyte ID No: 700157182H1
aaatgcatgaggacgaagatgataaacgatattcacctgagcctatgcctcagcagacagataacgaatttgaagaggcagatggatccttttctccacagctaatgcatggcaatgaagatgaagatgcaattgatcctgaagaggacaaagctgagctggaccgaaaacgtgaagctgtagttttggagcatcaaagaaaagttcaggaagccatgaaaacaaaggcaagagtacctgatgagatggagatgaag

SEQ ID NO: 580 - DNA, 254 bp, Zea mays
  misc_feature: Incyte ID No: 700157183H1
cttaaggcaaactataaggtgttgaaggaagcccgcaagcaaagtggtgttggatggaatgaggccatgggtatgatcattgcggaaccaccaatatgggcaaatataattatcagtaatccaaaggtcaagaaatttcggtcaaggccattccctttgtataatcagttgtcagcactctatgatggcagttgtgccaccggtaaatcagattgatcagcaagctgaaggatgtaaccagaaggaagatattt

SEQ ID NO: 581 - DNA, 256 bp, Zea mays
  misc_feature: Incyte ID No: 700157185H1
gccgcagtcccaccgaccccgccgccggtcgccctccatctcctcgccgctgcctctcgtttctcttttcaataatcaagatgagccgtggtggtagtgccggtggtggtcaaagttctctgggttatctctttggaagcggtgagccccccaaaccagcagtggcaccagctgcaagtgctccacctgttgagaaaccatctgctgcaaagactgatgcggccaagcaggttgctgctggggttaccagccaaac

SEQ ID NO: 582 - DNA, 160 bp, Zea mays
  misc_feature: Incyte ID No: 700157186H1
  unsure 117, 151: a, t, c, g, or other
cgctggacgccttcgacgtcatcgacgacatcaaggaggcgctggagaagcgctgcccggggaccgtctcctgcgccgacatcctcgccatcgccgccagggacgccgtctcgctgnccaccaaggtggtgaccaagggcggctggagcanggacggcaa

SEQ ID NO: 583 - DNA, 258 bp, Zea mays
  misc_feature: Incyte ID No: 700157187H1
  unsure 100-137: a, t, c, g, or other
acagcgttgagaggcgccgcgacgctgaaggcgagggctctcaaggaggtgtggaacatcgcggcggtgatcccggtggagaagggcccgggcccggtcnnnnnnnnnnnnnnnnnnnnnnnnnnnnnnnnnnnnnngaagcacggcgcgcccaagcagcagctgcaccgcaagatggatagcgacggcagcagcgtcacgaccctctcgctggaggaggagaacagcttccttggcatctgcagccaggagctgttg

SEQ ID NO: 584 - DNA, 161 bp, Zea mays
  misc_feature: Incyte ID No: 700157188H1
  unsure 43: a, t, c, g, or other
cacccagccccttaaccctcgttcctctagccgtctcgcgcancaacagcctccatttctcctccgacggcggtgcggctagctcaaccatggcggactccaaggccacctcggcggtcaccctccgcactcgcaagttcatgaccaaccgcctgctggct

SEQ ID NO: 585 - DNA, 123 bp, Zea mays
  misc_feature: Incyte ID No: 700157190H1
  unsure 110: a, t, c, g, or other
agcacagctagcgcctgctccccttcgcctgtgatcatgtcttgcagcagcggcaagtgcgactgtggctccagctgctcctgcggcagctcatgcaactgcatgtcccntaacgtggagacg

SEQ ID NO: 586 - DNA, 159 bp, Zea mays
  misc_feature: Incyte ID No: 700157191H1
  unsure 151, 155, 158: a, t, c, g, or other
aaaattcattattatctccaaaacaattgtccaaccccccaaagataaattgtcattgttgtgatggcatggggtttctgctagtctttacaacccactcgcttgttttcccaggtgctggagaagatcaacaacccacactatttatacngcanggng

SEQ ID NO: 587 - DNA, 255 bp, Zea mays
  misc_feature: Incyte ID No: 700157193H1
tgtagagttaccctcccagttcatggagaactggtgctatcacaagaatactcttttgagcattgcaaaacattatgaaaccggtgaaacccttccagaggaaatttatgcgaacttgtagctgcaaagaatttccgtgctggcaccttgagcctgcgtcagatacgatttgccagtgtagatatggagcttcatacaagttatgaccccaatggctcagtgtccatatatgatgtggaccaaagagttgcagaa

SEQ ID NO: 588 - DNA, 276 bp, Zea mays
  misc_feature: Incyte ID No: 700157201H1
gcttcatcgtcaagaagaagggcctacgccgggccgccaccgccggcgcccgcgcaggtgttggaggctatgggtacctcttggagccactgtggtggattgggatggttacgatgctgattggggagattgccaattttgtggcctacatgtttgcgccactattcttgtcacccctcttggtgcgctcagcataattgtcagtgctgttctagcccatttcaccctgaatgagaagctgcagcggatgggtgtgttgggctgtgtgctctgtat

SEQ ID NO: 589 - DNA, 274 bp, Zea mays
  misc_feature: Incyte ID No: 700157203H1
cacttgcaccaggtggaagcagagcatggtccatcatatacttcgcatcgtcatggatcacatttgcagttgctgaggcctgcctaattgccggagcaacaaagaacgcataccacaccaagtatagggatatggtatatgctggtaactggacctgccaaactctgcgcaaaggagtgtttattgccggagcagtcttcgtggtgttcaccatgattttggacgtctacttctacatgtactattctaaggccactagccaagctacaaaaag

SEQ ID NO: 590 - DNA, 141 bp, Zea mays
  misc_feature: Incyte ID No: 700157205H1
  unsure 18, 45, 50: a, t, c, g, or other
gggtcgagagctatcaanaaggctcgtggcctagatcagtggccntcatngcactttggagggtgcgctggtttaccatctcccacggggagagtggacgtcataatttgtggtagagggggtacgcgttcgcgcggcccc

SEQ ID NO: 591 - DNA, 272 bp, Zea mays
  misc_feature: Incyte ID No: 700157206H1
gttccaaaaagtccctggcagaatgttttccgagacagaagaagccatccaaagatggccatggtaattgatgaccgacttaatgtttgggatgataaagatcaacacagagttcatgtcgtccctgcatatattccatactatgctccacaagcggagatggccaatgctgttccagttctatgtgttgcaaggaatgttgcttgcaatgttcgtggtgggtttttcagagagtttgatgagaatctattgaggaaagtgttcgaactata

SEQ ID NO: 592 - DNA, 271 bp, Zea mays
  misc_feature: Incyte ID No: 700157207H1
ggcatcggctccagcctacatgccccatccgaccctgatgccggcgcctttcgcccaggcgcccctagctccattccatgcccagggccaagctgcagggcagaagctgatgatgcccttcgtcggctacccagggtacccaatgtggcagttcatgccgccttcagaggtcgacacctcgaaggacagcgaggcgtgccctcctgtcgcatgatcaccttgatggggctggtcctgctcacaccatgtggattagccgcaactagttgtc

SEQ ID NO: 593 - DNA, 270 bp, Zea mays
  misc_feature: Incyte ID No: 700157208H1
  unsure 63: a, t, c, g, or other
cattgagatactgaaagagtaccttggcaaggttaggaccatggtgaagccagggtgctcccnggagatcctgaaggcggcgatcagttccatggtgtcggtgacggatgtgctgactgtgatgtcccaccccctcaacgccgagctgcccctctaccatttcaagtgagcgagggcatcagtctggttgttattcctagagtgtttttgaaacagcagaagattctgcttcatggctgccggtcttcttttttttaatttgggtgagaa

SEQ ID NO: 594 - DNA, 128 bp, Zea mays
  misc_feature: Incyte ID No: 700157210H1
gtgatgatcaatatatgtattgttgcacatgatcagcaatgttgtattggtggggtgactaatgcctgccgccaaactgagcgatataacgcatcattaatgacatttgttcaatctggactttaaaa

SEQ ID NO: 595 - DNA, 254 bp, Zea mays
  misc_feature: Incyte ID No: 700157211H1
ctgcattgttgaaattgtgtgctttcgcgtcatttgttgctggtcgcattgtgttttttctcaccatccttctttcttccttgtttttctccttcggttacatcaaaccctagcgcgccgcaaccatcttccttatttttctccttcggttacatcaaaccctagcgcgccgcaaccatcttccttgtttctctccttcggttacatcaaaccgagtcaacgccgcttccttatttttctccttcggttacgtc

SEQ ID NO: 596 - DNA, 268 bp, Zea mays
  misc_feature: Incyte ID No: 700157212H1
cgattatgaggcgtgtgaatcacacagtgcaaaccagatgatggatcaccttagagatgttatggcaaatagcaagcctggagagaaatacggaaattacaccctccaatttgctgatgatttcagctatactgatcctgtagacggtagtacggtatcaaaacaaggacttcgatttgttttcactgatggatctaggattatcttccggctttcgggaaccggatctgctggagctactatccgcctctacatagaacaatttgaa

SEQ ID NO: 597 - DNA, 268 bp, Zea mays
  misc_feature: Incyte ID No: 700157214H1
agcttggtttcactctcatcagatgagaactacttcttaggaagctccatggatggatctatcaaactcttcgatcttcgcctcattcagaagggaggtatacagtcgtatggggggcatgtcaactcacacacacatttaccacttgctgttgatccatctgagaccttacttatgtcaggtggggaggactgcactgttcgcatctggagcatcaaaacaggcgagctaatctttgcgcggacatgggagacagtcccttcacgtc

SEQ ID NO: 598 - DNA, 271 bp, Zea mays
  misc_feature: Incyte ID No: 700157216H1
ctcggtcgcttcaccactccactcgccgcagcgcccgggcgccgccgaggggatcggagcaagatgttcttccacatcgtgctggagcggaacatgcagctgcacccacgacacttcgggccgcacctccgcgacaagctcgtttccaagctcatcaaggacgtcgagggcacctgcagcgggcggcacgggttcgttgtggcgatcacgggtgtggaggacatcggcaaggggctcatccgggaaggcacgggatacgtcaccttccccg

SEQ ID NO: 599 - DNA, 269 bp, Zea mays
  misc_feature: Incyte ID No: 700157217H1
  unsure 30, 46, 68, 83, 88, 99: a, t, c, g, or other
gcggggtacctggcgcggcgggcggcgcanaaggagcgggtgcgcntgctctaccgcaggcgctcaangacacgctcaactgngccgnccaccgccacntcttctaccaggacgcgtcggatctccgggacaagttcgaggccaaccgacacgtggataacctggacgtggtcgataggctcatcgacgatgcggaggctcagtacaggaacttccagcaccccgatccctacattgttccatgggcaccaggcggcataaattcacaa

SEQ ID NO: 600 - DNA, 162 bp, Zea mays
  misc_feature: Incyte ID No: 700157219H1
  unsure 54, 97, 126, 144, 153, 156-157: a, t, c, g, or other
accaaatccgtgctctatggttgggagacacatgtttttatgggtacaattgtngtattggtgcttggcgagcaaacatggcaatcgttttgctganttcaatgttgacacctatgttttgcttantacgatttgaactttganaaaaaaaanaanngagat

SEQ ID NO: 601 - DNA, 161 bp, Zea mays
  misc_feature: Incyte ID No: 700157222H1
  unsure 20, 57: a, t, c, g, or other
ttttattagtgatgcaagtngctggtattggtgcattatcgggctaatacgcttgcnttgccttctgattttataagtgatgtaaattgctggttttaacgtgcattacctggtgggctggttctataactgatgcaaattcctggttttaacttggtgca

SEQ ID NO: 602 - DNA, 252 bp, Zea mays
  misc_feature: Incyte ID No: 700157223H1
  unsure 19, 149, 171-200: a, t, c, g, or other
ccaggcgcacgtgcccgtnggcggcgcctttctccagcaagttcatccacgagtaccacgagaggacgaggcaggagcacgacgagctggtcgacaggtccgacgaggcggtggagagcgtggagaaccccgggtggtgcatagccaangccgtggcgctgctgctgctgnnnnnnnnnnnnnnnnnnnnnnnnnnnnnnccgctcgtggacgccgtccacgcttctccaacgccacgcgcatcccgtcctt

SEQ ID NO: 603 - DNA, 265 bp, Zea mays
  misc_feature: Incyte ID No: 700157224H1
cttgtttttgcttctgttatggcaacccttggccttcagataattctagaatcagtacgctcattggtgtctgatggagatgaattcagcttaacaagtgatcaagaaaagtggcttgtggacatcatgctctccgtgacattggtaaaacttgccctggttatatattgccgctccttcaccaacgaaattgtcaaagcatatgcacaagatcactttttcgatgtcatcacaaatgtaattggcctggttgctgcactacttg

SEQ ID NO: 604 - DNA, 265 bp, Zea mays
  misc_feature: Incyte ID No: 700157225H1
ctgaagaggatcagaagatattcaagtacttggactccattgatgtcgatgattctgatgttaaggcaggatattccatttaccttaacttctctgagaacccgtactttgaagacacaaagcttacaaagacctattcctttgttgatgatggaacaaccacaataaaagcttctcaaattaagtggaaggatggaatgggacctgcaaatggaaatggtattaacaagaagggaaacaagcggccattagtagtggaaagttt

SEQ ID NO: 605 - DNA, 265 bp, Zea mays
  misc_feature: Incyte ID No: 700157226H1
caatatactacagagcaggatcaaccccaatgaagaactcactagtgacgaggaagcaaaatggcgaaggtgggttgatgagcaccttgtgcatgtcttatctcctaacatatatcggacaacttcagaagctctagaatcttttgactacattgcaaaacatggtaatttcagttttacagagaggtttgccgtgaagtatgctggtgctgcggccatgtacatggtatctaagaaactaaagaagaaatacaacataactgac

SEQ ID NO: 606 - DNA, 262 bp, Zea mays
  misc_feature: Incyte ID No: 700157227H1
gaaacatgatcatgagggacattgtgggtctcatctgtcagaagttgcagccattgacatgaacagaatgaacttcgaaggatctggtggtccatcctctgagaagaatttaagttatatgcgtgttcaaatcgagaggcagcgtctgaaaataaaatctcagatgctgagaattgagcagaggcatttcaagtggctgaagttcagcaaggagaaggacagggagctgcagaaaatgaagctggagaatgaaaggatggcg

SEQ ID NO: 607 - DNA, 262 bp, Zea mays
  misc_feature: Incyte ID No: 700157229H1
  unsure 3, 78, 114, 167, 182, 216, 237, 248: a, t, c, g, or other
tgnctttccttggtctccattgctgccgtctgcgtctgtgtgggattgatcatgaagagcctgccacaagttggttgnatgaagcctttcctctgggacaatatacgttggggncccaattgatagactgcagaagagccagcccgattgtatcagtgtatgatgangatgtttgcgccgancgaactagtttcttgtaatgtacatgtttcttanactaaatgtctaacttattcngtttatagtanaacctgtgaacttg

SEQ ID NO: 608 - DNA, 264 bp, Zea mays
  misc_feature: Incyte ID No: 700157230H1
  unsure 2: a, t, c, g, or other
gnctgtgccgcctccgacatcctactttcgtcctcacgagtgaccgataatccgccggcgctaagatgttggtttatcaagatctcctatctggcgacgagctcctgtcggattcattcacctacaaggagctcgagaacggcgtcctgtgggaggtcgagggaaagtgggtcacccaaggtcctgttgatgtagacattggtgccaatccatccgccgagggtggtgaggacgaaagcgttgatgacacagccgtgaagtggt

SEQ ID NO: 609 - DNA, 266 bp, Zea mays
  misc_feature: Incyte ID No: 700157233H1
caaagacaaattgctaggtgactttagccaacaaaggactgtagttgctattgacggtggcctatacgagcactacaagaagttcagtgcctgcctagaggcgacgctcacagacctgctcggcgaggaggttgcctcatcggttgttgtcaagttggccaacgacggctcaggaattggagctgcacttcttgctgcttcgcactcccagtatgctgaagctgcatagttctaggagctcgggggtcctagtgtaaccttttttt

SEQ ID NO: 610 - DNA, 264 bp, Zea mays
  misc_feature: Incyte ID No: 700157234H1
gactaggtccttctatgacatgcttgacaagggccagatcagcgttgtcgtcgaggagtaaagagttcttcccagttattttcaaagaactctctcgagagcatgacaaagtgattgcttgctgtggagatttgtcctggaaataagcacaaccatttgggaacaccagattttgtcgaattttcctttccttttgatgaatatttgagcacgtccatgtcaataccaaacatctggccttttctctctctgttttttttacat

SEQ ID NO: 611 - DNA, 263 bp, Zea mays
  misc_feature: Incyte ID No: 700157235H1
  unsure 65, 108: a, t, c, g, or other
ggataatgaacctgctgccctgagcgtttgtcagcctgcgtcctgatcggggcctgtaatttctnttttgatgtcctctggacatggatgggtacaacttcacgcagntgcacggaaacgggaccaaatgattgaaatttttatactagtagggtgttactgtagttttcccagttgaatttaatttgtaactgagtttgtactctgctggacatggatgcaggagaatcttgctggaaatttagttgtgcttgatgtttgca

SEQ ID NO: 612 - DNA, 260 bp, Zea mays
  misc_feature: Incyte ID No: 700157236H1
ggtctttcggcgctcaggttctaattgatgacaaccccagatatgctctagagtgtgctaatgatggcatgagggtccttctgttcgattacgaaagctcgtatccttggtgcaaaactggagccgatgaactccatccgctggtgacaaaggttcacaactgggaagaagtcgaggagaaacttctctcttgggtagtacctgatagctgacactcttctgtcttgtgagaagcactgcttgagaccagcaaatgattc

SEQ ID NO: 613 - DNA, 188 bp, Zea mays
  misc_feature: Incyte ID No: 700157237H1
  unsure 12, 38, 160, 167, 171, 175-177, 180, 182: a, t, c, g, or other
tgaatggaagcnatatattccaggacagtatgcaaatncaagtgttttggatcgattcgacccacttttgttttttaggctgtaaaaaaactgtgtcctagaatccaaggattcttatggtaatgagtatgactttgtggaagaaaaacgtttactcaanaaaaaanaaanaccnnnaananaaaaaa

SEQ ID NO: 614 - DNA, 261 bp, Zea mays
  misc_feature: Incyte ID No: 700157239H1
attggaagcattgattcggctgtcagaagctattgctcgaagccatttagaaagagttgttctcccagctcatgtccgcctggcagttaaattgctcaagacatcaatcatcagtgttgaatcaagtgaagttgatctctctgactttcaagatgctgaagatggaacaaacgtaccttctgagaatgatgctggacagccagctgaagaaggtgctgctcaacagcaggatgcagaaaatgaccaagcagcggataacgg

SEQ ID NO: 615 - DNA, 260 bp, Zea mays
  misc_feature: Incyte ID No: 700157240H1
agcatttgaaaaacagagccctttattggaggagtgccttagggaattttattcgacatatgatgataccctcgtgcagtggaatggggctgaacttatgacaagagtgataagcaatatttctagcagagcagatgaaaacagggggcatcttgacattaagttggagccctttgttaaattttaccctataagctctactgatattatacgatatttctcagagcccgataacatggtccaaaaagcacatcatgatg

SEQ ID NO: 616 - DNA, 260 bp, Zea mays
  misc_feature: Incyte ID No: 700157242H1
atggagtgcaggcatctgctgtctcggatctttgtggcgaaacctgagcaacggataaccatcccagagatcaagaaccacccatggttcttgaagaacctgcccatcgagatgaccgacgagtaccagatgaacctacagctagtcgacatgaatgtcccctcgcaaagcctggaggagatcatgtccatcatactggaggcccggaagcccggcgacgggctgaagcatgcgggacagctccccggccttgggagcat

SEQ ID NO: 617 - DNA, 138 bp, Zea mays
  misc_feature: Incyte ID No: 700157243H1
  unsure 63: a, t, c, g, or other
aaatgggtgtctcgtctttctgttggattggttcgtggtttcgtatttcatgtgttgtttggnggtgaactgtcgtgtgctcttagcaagttgtctgccacagaatttgtggccataaatgctacaagttcctcctgc

SEQ ID NO: 618 - DNA, 259 bp, Zea mays
  misc_feature: Incyte ID No: 700157245H1
cctccaacatgaccccttcgaggtcctggaccagaagggagtgggcgagctggtgaagtttgctacagagaggggccgcaaagctaggcctaacttgaaggtgggcatttgtggagaacacggtggagagccttcctctgtggccttcttcgcgaaggctgggctggattacgtttcttgctcccctttcagggttccgattgctaggctagctgcagctcaggtgcttgtctgaggctgcctcctcattggcaaccgg

SEQ ID NO: 619 - DNA, 257 bp, Zea mays
  misc_feature: Incyte ID No: 700157246H1
  unsure 31, 39, 51, 84, 94, 132, 150, 179, 190, 216, 227, 238, 251: a, t, c, g, or other
ggacaagtccacctgcacggcttccagacgnagggctcntacctcttcggncacttcagcatgcacatgaagctcgtcggcagntactccgcgngcaccgtcagggccttctacctgtcgtcgcagaactcngagcacgacgagatcganttcgagttcctgggcaaccggacggggcngccctacatcntgcagaccaacgtgttcaccggcggnaagggcgaccngagcagcgatntacctctgttcgnccccag

SEQ ID NO: 620 - DNA, 264 bp, Zea mays
  misc_feature: Incyte ID No: 700157248H1
gtgaagtgctaaaaaggcaaggtcatggtgaatacagggagataactgaaggggacttcctcggggaggttactggcagtgaaaaagtcatatgccatttttaccaccgtgaattttaccgttgcaagatcatggataagcatttgaaggcccttgccccagtctatgtgggaacaaaattcgtcaagcttgatgctgaaaatgctccattctttgtggccaaactggcaatcaagacactgccatgtgtaatattgttcaaga

SEQ ID NO: 621 - DNA, 270 bp, Zea mays
  misc_feature: Incyte ID No: 700157250H1
  unsure 47, 201, 240, 252: a, t, c, g, or other
aaaagaaagtgttcgggactttgttgtcggcagtggtgaatatgtgntcaaagattttaagttcactgttaaccaagcagtgcgaccagtggagaagcgcattgataaattgatgaaaaagaatgataagagtaagaaaagccaggacgacaactgggtgagtgcagcaacaccagagaggcctgttcgtgggattgatgntccattattaagcggaacgcaagtgacagtggtgtcacnaagggcagaaantatcgcagagttgtgagt

SEQ ID NO: 622 - DNA, 269 bp, Zea mays
  misc_feature: Incyte ID No: 700157251H1
accgtcgccaggctgagctcgctccccggcgagatctccttcccctgcggcctcccctcgctccgcttcttcatcgacgacgttgaggatcctgttgctaatgaccctctccagttgcttccgaaaagaacttaccagcccagtaccatcaagcggaaaagaacccatggattccttacacgtaaatcgaccaagggtgggcgcaaggtgattgcccggagaatcgcaaaatgcaggcacagaattcagtttagcaagattccatagca

SEQ ID NO: 623 - DNA, 269 bp, Zea mays
  misc_feature: Incyte ID No: 700157252H1
  unsure 28, 61, 166: a, t, c, g, or other
cgcacttcgggaggtcaggcccgccggncatccgcgacaccttctcgctcctcgtcctcancatcagcttccgcaccacggccgacgacctcttcccgctcttcgagcgctacggcaaggtcgtcgacgtcttcatcccgagggacaggaggaccggggactcgangggtttcgcgttcgtgcggtacaagtacgccgacgaggcgcagaaggctatagatcggctcgatggccgtgatgtggatgggagaaacatcatggtgcagttt

SEQ ID NO: 624 - DNA, 265 bp, Zea mays
  misc_feature: Incyte ID No: 700157254H1
  unsure 26, 136, 164: a, t, c, g, or other
agataactctgcgcactgttcccaanttgacacggagcaactgctggcccatctagtagaaacagaaatgataaagagaacgaaagaaggaaggtacaagggaaggaagttcagttcagtatgtcatttctttggntatcaggctcgaggatctacaccatcanatttcgactgtgactatgcttatgctcttggacgtatctccctgcatatgattacagttggattgactggctacatggcaactgtggctaatctgaaagac

SEQ ID NO: 625 - DNA, 264 bp, Zea mays
  misc_feature: Incyte ID No: 700157255H1
  unsure 182, 258: a, t, c, g, or other
gtgttcctgttatagccagtgattacattgaacttccattcgaagatattatagactacaataaaatatcaatatttgttgggacaagcaaagcagtacagcctggatacttaacttcaactcttcgaagaatcagttcagagaggattctggagtaccagagggaaataaaaaaggtcagncattactttgagtacgaggatccgaatggaccagtgaacgagatttggcgccaagtatcccttaaagcaccactgntaaagt

SEQ ID NO: 626 - DNA, 264 bp, Zea mays
  misc_feature: Incyte ID No: 700157256H1
  unsure 258: a, t, c, g, or other
gcacggccatcatcgagctagccgagctgcaacggctgtccacgtcgatgaagaagctggagaaggagctgaagcaccaagagctgtacaagaacgagcagtaccgcatgaagctgcacaagtcgaacgagcggctgctggcgctcgtcaagtcgagcctggacatcgtggtggccgtggggctcctgcagctggccccgaagaaggtgaccccccgcgtcacgggcgcgtttggcttcgccagctccctcatcgttnctacca

SEQ ID NO: 627 - DNA, 264 bp, Zea mays
  misc_feature: Incyte ID No: 700157258H1
  unsure 64, 139, 190: a, t, c, g, or other
acccggtggcacaagaagatccccgtcctgctccaccacggcaagcccatctccgagtctctgntcatcgtccagtacatcgacgaggtctggtcctccggcgcgccggccttcctccccgtcgacgctcacgcccgcnccgtccagcggttctgggcgcagtacgtcgacgacaagctgccttgggcgntccgcatactgaagggaacggacgacgggggcatggagcaggctgctgggcagtgtccgcggccctgcagctct

SEQ ID NO: 628 - DNA, 269 bp, Zea mays
  misc_feature: Incyte ID No: 700157259H1
  unsure 2, 134, 216, 238, 245: a, t, c, g, or other
antccgttagctagcgctgtggcagttgcatcactgaaagtggttcagagacgaaggtcttgttgaaagggctgcaaagttaggacaggagtttagggaccagttacagaaggtccagcagaaattccctcaantcctaagagaagtgcgcgggaggggtttgctgaacgcagtgcatctaaacaacgacgcgctatctcctgcttctgcatatgncatctgcatcaagttgaagganagaggcnttttagcgaaacccacacatgaca

SEQ ID NO: 629 - DNA, 271 bp, Zea mays
  misc_feature: Incyte ID No: 700157262H1
  unsure 112, 227, 231: a, t, c, g, or other
aacgaaaagaagatgtttgaggttaaacttaaggagataaagtcaacactgactgctatgataaatgatgaggctgcaatatctgaagtgattgagactgtcaagcagcaanttaaggatgctaaatttcctgatttagaggttattcgcatgttgtgggatgtgctcatggaggctgttcagtggtctgggaagaaccagcagcaaaattccaatgcagcacttangcangtgaaagcttggactgagctttgaatgctttttgcacgag

SEQ ID NO: 630 - DNA, 274 bp, Zea mays
  misc_feature: Incyte ID No: 700157263H1
  unsure 234, 246, 253, 266: a, t, c, g, or other
aacgagcttcatctccaagctccaggcgctcctcccggagtcctcacgccgccggaacgcgagcaggtcgtcggcgtcgaagcttctcaaggagacgtgcgcctacatcaagagcctgcaccgggaggtggacgacctctcggaacggctgtcggggctcatgtcgaccatggacaacgacagcccccaggccgagatcatccggagcctcctccggtgacccggccatgccgncatgcgcgcgcncgcgggnctggcctcttcgntttgcctg

SEQ ID NO: 631 - DNA, 275 bp, Zea mays
  misc_feature: Incyte ID No: 700157264H1
  unsure 243, 245, 254, 263: a, t, c, g, or other
aactcattggcagcagcaaccgcagccgcgagggccaagcaggggggacaaggaaaagggccgacgaagaggaaaaaggaagaacgcgtcgcggagccatggggcttggccttggcgtgcgggcggcgcccttcacgtacgcggcgcacgcactggccgtcgcggcggcggccatggttctcgtctggtccatccagttccgcggcgggctcgccatcgagtccaccaacaagaactcatttnanggttaaccntgttcttangcttatgggtat

SEQ ID NO: 632 - DNA, 246 bp, Zea mays
  misc_feature: Incyte ID No: 700157265H1
gaaaaattgttttgcagtttaataaaaaacattttagacaacttgggtcaccctgtttgaacagggtgcaaccacgtctcattattttcgttcttatggtgtccgtatggaatgcctaggtgtttagctgtgcacaaataacagttaaactttgacggctcctatttcaactgctggagaaatgccagtgccctatttttgaccaccagggtgtggaatggaaatcggtaatgcatccatttgaaa

SEQ ID NO: 633 - DNA, 235 bp, Zea mays
  misc_feature: Incyte ID No: 700157266H1
  unsure 13, 20, 36, 38, 46, 59, 67, 86, 97, 101, 107, 114, 127, 131, 151-152,154, 157, 162, 177-178, 182, 187, 191, 215, 228, 230, 233: a, t, c, g, or other
acgtaacatcgcngtcgtcnagcgcacaagctgtcnanaaaatctnaaagcaagggttncaattcangcacaccacacaaccaggnccgggttcgcncgcncacgtngccgttnacagcaactagcntatntagctagagtagctcgatcnntntgntgtcnttacaccaccagtcnnccgnttctnttgnttcggcggcgtcgtcggcaagcgngcgccctactgtncnatncg

SEQ ID NO: 634 - DNA, 261 bp, Zea mays
  misc_feature: Incyte ID No: 700157267H1
  unsure 110: a, t, c, g, or other
caagtacccaaacggctcgcgccctaaccgcaccgccgggaaggggtactggaatgcgactggggccgacaagtcgatcgtgcccatgggcagcaccagggcggcagggntcaagaaggcgctggtgttctactctggcaaggcgtccaggggcgtcaagacggactggattatgcatgagtaccgcgtcgtcaagcggaccacaccctggggaagaagggctcacataagctggacgagtgggtgttgtgccggctgtat

SEQ ID NO: 635 - DNA, 261 bp, Zea mays
  misc_feature: Incyte ID No: 700157268H1
  unsure 44, 165: a, t, c, g, or other
gcaactcccacccgatccccaaattctccggcggtgatggccancctgtggcgcgccgtgatggatagcgtcacgtcttcctccccctcggcgctggacgcggccccaggtagcggcgtcgagttctggcacggcgcagagcgcgctgggtggctaaataagcanggcgagtacatcaagacgtggaggcggcggtggttcgtgctgaagcaggggaggcttttctggttcaaggaccctgcggtgacacgggcctcggtg

SEQ ID NO: 636 - DNA, 259 bp, Zea mays
  misc_feature: Incyte ID No: 700157270H1
  unsure 176: a, t, c, g, or other
ccaagccccacgggtttcgtgatgaacatgcaaccttcagaagcggaggtcggctttgacctccgccttcctccaaccgaagacatcgagcagatcaagcggagggtcgaagaggaatgggcaccatctcacaaaaacctgacctacgagctggtgcagaaaggtccggcgacggntgtgtccggacgtcccgtatccacagcgacgaacgcgtcgaacccgtggtggctgacgttcgagaaggccatcgcctccgggg

SEQ ID NO: 637 - DNA, 258 bp, Zea mays
  misc_feature: Incyte ID No: 700157273H1
cgcgtaccaggtcgaaggtgcagttgcagaggacggaaggaagcctagcatctgggacacattcacacatgaaggctattcccttgacaacgccacaggcgatgtaactgcggatcagtatcataagtacaaggacgacgtaaagcttctgcatgagatgggtgtcgatgcctaccggatgtcgattgcctggcctcgacttatcccagatggtcggggagccgtgaatccgaagggctggagtactacaacaatctc

SEQ ID NO: 638 - DNA, 259 bp, Zea mays
  misc_feature: Incyte ID No: 700157274H1
gaaagccctcattgacatcaggaacactgcggacaccactatctacagcatcgagaagagtctaggggagtacagggacaagatcccggcagaggttgcatccgagatcgaggcagccatcgctgacctccgtcaggagatggcctcggatgacatcgagaagatcaaggccaagcttgaggctgccaacaaggctgtctcgaagattggtcagcacatgtcaggtggtggctctggcgactcacagtcgggattggac

SEQ ID NO: 639 - DNA, 260 bp, Zea mays
  misc_feature: Incyte ID No: 700157276H1
agcaatcagctcatctgtcagcgccacaggtgaccggaaaaccacggccggcgttcctgcttctctacccggtccgaattgctgaccggatcaacccgagaccttgcaggattatcgatctgattgcggcatgatccgcttcatcctgctgcagaaccggcaggggaagactcgactggccaagtattacgtcccgctcgaggactcggaaaagcacaaggttgaatacgaggtacaccggctcgtggtcaatcgggacc

SEQ ID NO: 640 - DNA, 263 bp, Zea mays
  misc_feature: Incyte ID No: 700157277H1
ggagcgtgaggcacaagagaggcaattggaagaagaagctagggcgcggaaagcaaaggaggaggctgctgctgctttagagtttgagaaatggaaaggggccttctctgttgatgctgaaggtacaacagagagtgagacacaagacgatggtcagggtttgctccacaactttgtggaatacatcaagaagcagaagtgtgttcccctagaggacctagctgcagagttcaggatgcgaacccaggactgtatcaatcgga

SEQ ID NO: 641 - DNA, 117 bp, Zea mays
  misc_feature: Incyte ID No: 700157278H1
gcaccagacatccgtccatgacgacgtcgtccagcgaggtcacggtgtgctcgcacctgttcacggtgagaggctacacccacacaagggggcatcggcgtcggcaggtccatcgag

SEQ ID NO: 642 - DNA, 258 bp, Zea mays
  misc_feature: Incyte ID No: 700157282H1
  unsure 141, 145, 226: a, t, c, g, or other
aaggtcccaatattgacttcaagaaggagcttaggaccctcaacagagagcttcaattgcatattttggagctggcagatatattagttgagagaccatctcaatatgctcgtagggtagaagatattacgctcatattcnagancttacatcatcttctcaattccttacgacctcatcaggcaagggccacattgattcacatgcttgagagccaaattcggcnccgcaagaagcaattgaagatataaagcagag

SEQ ID NO: 643 - DNA, 255 bp, Zea mays
  misc_feature: Incyte ID No: 700157284H1
agcaaagcatcagatattaaaggtaatgataaacgttcagctgccaatgaggatgtgaatgcagagggaagtaaggggaagagaaagaggggaaatgttaaggaccttcgtttcgaggaactggacaagaacatctcagcctcgaagaagcagaggaggaagcagcacctggatgagaagaaaaagaagcgcaaggacaataagacagaaactctaccagactttcctgggcgcgagaaagtcaatttggtgaag

SEQ ID NO: 644 - DNA, 253 bp, Zea mays
  misc_feature: Incyte ID No: 700157287H1
  unsure 105, 252: a, t, c, g, or other
gcttgataatgtcgggcctgaggactacttctcccgatttgagtacaaggcggccaccggttcgttcacccctgaccgcgtggcagtgtattgcaaatgtgagangccatacaacccggatgacctcatggtgcagtgcgaacttgcaaggactggttccatccatcttgcatggctatgaccattgaacaggccaaaaaactagatcactttgtttgctcagactgtttgaaagaaaatggttcaaagagnc

SEQ ID NO: 645 - DNA, 252 bp, Zea mays
  misc_feature: Incyte ID No: 700157288H1
  unsure 88, 217: a, t, c, g, or other
ggcgcggtcaccggtatcaagaaccagggccagtgtggttgttgctgggccttcgctgcggtggcggccgtggagggcatccaccagntcacgacgggcaacttggtgtcgctatcggagcagcaggtgctggactgcgacaccgacgggaacaacggctgcaacggcggctacatcgacaacgccttccaatacatcgtcggcaacggcggcctcngcaccgaggatgcctacccgtacaccgccgcgcag

SEQ ID NO: 646 - DNA, 252 bp, Zea mays
  misc_feature: Incyte ID No: 700157289H1
ttagagaaaattaactggcttctttttggttatttgttcttgttctggattggttgatactgtggttctggatttggttacttgcgtcctaagatcatttcagttgcctcattttagtctggccagttgatccatgaatgcaaagagattatcctttggttccattctatgtgcctttagcattggagggcctctatttatggttgcttgacgaactggttatgtttgcttcgccatgttggtcgggtgttc

SEQ ID NO: 647 - DNA, 256 bp, Zea mays
  misc_feature: Incyte ID No: 700157290H1
  unsure 2, 38, 184: a, t, c, g, or other
anttccagggcccatccgccattgccggcaagctcggntctcttcccttccaggcctgcgagcaccagatcgtcaccgtcgactgccagccgtcggggccccagggaggcatgctcgtcttcgtctccggttccatccgcaccggccccgaggagcaccccatcaagttctctcaggcattccntttgctgccggcagctgggtccttcttcgtgcagaatgacatgttccgcctgaactatggctaaaagacagc

SEQ ID NO: 648 - DNA, 184 bp, Zea mays
  misc_feature: Incyte ID No: 700157291H1
  unsure 17, 83, 115, 120, 141, 154, 158, 175: a, t, c, g, or other
aggcagcagtgcaagcncactgaattaacatgttcatcggataaacaacttcggcaatgaagagtcttagcaattacagttcncaaaattttaaattgcaatttttcagaacccncggcngccaactttttgttttcatgnaacaaaattaggncccnaacaaaacgaaggagcnagcatcaca

SEQ ID NO: 649 - DNA, 259 bp, Zea mays
  misc_feature: Incyte ID No: 700157293H1
  unsure 54: a, t, c, g, or other
ggatgatgcttcttcaactgtgtattatgatggtttgcatagctctactcgatnatatatttttcatcaattgcttgttgtttatgcagatcaggaaaatcagtgagtgagaatccacttctgacacatcttgtttttgttgttttataggttaaggctggagacttattacgaaaatatccagtccttgttatcaatatatgatgacattattgtcaaagtaggcaccatctcttttaaagcatatgctccatcactt

SEQ ID NO: 650 - DNA, 267 bp, Zea mays
  misc_feature: Incyte ID No: 700157295H1
  unsure 40, 237: a, t, c, g, or other
cttcgaaggttccagcgagcgactgtgtcgagcaggaganagcgcgatggggaagatgcggcagctgattctgcctcgtggccgccgtcaccgccgcggccatcctcctgacagcgtcggccaagaagtccggcgacgtcaccgagcttcagatcggcgtcaagtacaagcctgagtcatgtacgctgcaagcacacaaaggagacaaaattaaggttcactatcgtgggacactcnctgatggatcagttttcgattctagctatg

SEQ ID NO: 651 - DNA, 268 bp, Zea mays
  misc_feature: Incyte ID No: 700157305H1
gccaaggccttcttcaacatcctcgacttctccgtgttcagctgggacaacaagctcccgggcgcccagctgctgctgtcgcggctgcgcatgttcctcaaccccggctacccgtacgaggagtcgctcgccggctaccacaacgccaccagcctcaacatgtgcatgtacttcccgcgcttcgccgccttcaacttcaccaagggcgggatggcgctcttcaaccacggcagggggcagccgctgcagtacgtcgtcgccaactcct

SEQ ID NO: 652 - DNA, 264 bp, Zea mays
  misc_feature: Incyte ID No: 700157307H1
  unsure 208, 228-230, 234-235, 238-239, 241, 244, 249, 251, 258, 263: a, t, c, g, or other
gctgctgatctgttctctctgtgtgtatgagatgatgctcgtttacatatgtatctggttggttgtactttcggtattgtaatgttattatatcaataagtgttatgtaatctcctacgtttgagtgtttattcgatgattcattttttgtatacggttaacaagttactccatgaaaacatttctcatggagttcagttcgaaaaanaaaacaaatcaagctaaaannnaaannaannanagnagaananaaaaaanagagna

SEQ ID NO: 653 - DNA, 268 bp, Zea mays
  misc_feature: Incyte ID No: 700157309H1
  unsure 77: a, t, c, g, or other
gcaactcccacccgatccccaaattctccggcggtgatggccagcctgtggcgcgccgtgatggatagcgtcagcgnctcctccccctcggcgctggacgcggccccaggtagcggcgtcgagttctggcacggcgcagagcgcgctgggtggctaaataagcagggcgagtacatcaagacgtggaggcggcggtggttcgtgctgaagcaggggaggcttttctggttcaaggaccctgcggtgacacgggcctcggtgccccgcg

SEQ ID NO: 654 - DNA, 270 bp, Zea mays
  misc_feature: Incyte ID No: 700157310H1
cagcgatcttccaaagcttcagggacatcaatgaagtgatacaagatacgatcgagctgaagaggaggcagatggcggtagaaaacgagctaaaggagatgcagggcaggtattcagagctcagcgtgcagttcgccgaggtggagggcgagcgacagaagctcgaaatgaatctcaagaaccgatcaccatggagatcatagggaacctccaatcaaagcgaagaaaactaacgagagaagaaaaaaaagtgtcagccagctgcaggct

SEQ ID NO: 655 - DNA, 230 bp, Zea mays
  misc_feature: Incyte ID No: 700157313H1
  unsure 31, 44, 55: a, t, c, g, or other
tccgtaaaccctagccgcctgtcttgctgangctgaactgctanatccgtcttcnaagctgtggtgtcatcccctgagttctgatccaagatgtatctccagtattacatcaatgagaagggggacaaggtctacaccaccaagaaggagtcacctcttggggtgccgacgcatctgctcacccagctcgcttctcaccagatgacaagtactctcgccagcggtactgt

SEQ ID NO: 656 - DNA, 258 bp, Zea mays
  misc_feature: Incyte ID No: 700157319H1
cagtggtcattaccattagaaccagcctcagtgtctcctggtttggaagcagagttctctcacctgaatattagacaaccttctcccccacctgtcctagctcaagtgcaccctgagcatggtcaaattcctccatcaagagttgctgatccaagaccaggacttgctacatctgcaaccggacgctatcagaatttgcatgtgccagtggcattaatggagtgtttcctgaggctcgctgagttaaataccgcaaag

SEQ ID NO: 657 - DNA, 259 bp, Zea mays
  misc_feature: Incyte ID No: 700157321H1
ggcctgctgggggcctccctggtgctgagcctgagctggtggctcctcgtcgccgcgcagttcgcgtacatcgtgatgagccccaggtgccgtcacacctggaccggcttcacctggcaggccttctcgggcctctgggacttcctcaagctctccgccgcgtccgccgtcatgctctgcctcgagacctggtactatcaggtcctggtgctcatcgccggcttgctccccaaccctgaacttgcattggacgcgctgt

SEQ ID NO: 658 - DNA, 260 bp, Zea mays
  misc_feature: Incyte ID No: 700157322H1
gaccggcgttgcctatctggtggcgatggttctactggtgcaacacggtgtcctggaccatctacggcgtcacggcgtcgcagttcggcgacgtaggccgcaacgtgacggctactggcaacgccggcacagtcgtggtgaaggaatttctggaacaaaacctgggcatgaagcacgacttcctcggctacgtcgtgctggcgcatttcggctacatccttctgttcgtcttcctcttcgcgtacggcaccaaggctttg

SEQ ID NO: 659 - DNA, 260 bp, Zea mays
  misc_feature: Incyte ID No: 700157323H1
agcaaggctcgataagaagctgacacaggcacaacttgctcagatgataaatgagaagccacaggtgattcaggagtatgaatcaggcaaggcaatccccaaccagcagatcattagcaagctcgagagggccctgggaaccaagttgcgtggcaagaaatagctttcctacgagtttgtgtcccggagcatcataatagggggaagacaaggcaagctgtctgcttatttgtctatgtttggtatctcaagtcctgcgg

SEQ ID NO: 660 - DNA, 262 bp, Zea mays
  misc_feature: Incyte ID No: 700157324H1
  unsure 179: a, t, c, g, or other
gttatccgttctgttgcagaaaatggagatacggaagaaactggtgataaaaaaccaaagcttgaagttgaagcagtcgatatgaagtccaatggtcaatccaagcatgaagagaaagatgacagcaaggtggaacaagaggaactgaaaactgagctcagcttgcaagagagcaaganagttagcttcgacaaggacacatggacaaaaaacaaaaaacaagaaactgaatcgcccaatgatgagttaggctcggagaagg

SEQ ID NO: 661 - DNA, 261 bp, Zea mays
  misc_feature: Incyte ID No: 700157326H1
ctatgcgattcatgtactttccttgacataccagaaagttccaaggcctattcttgtagaggcaatcaacatcgaaggtctcgcgttggacaagtttcttgagtaccatgccgcgaactcaggttgggtgattgagaagggtgggcagtctcaagtgattgttcttccgcgtaatgagttcaatcacccagagctcaagaagaacacagccgatatccttccgtttgaacacgtaacacgcatattccctgtccttggctg

SEQ ID NO: 662 - DNA, 260 bp, Zea mays
  misc_feature: Incyte ID No: 700157328H1
gcatgcgcacggacaacaccatcaggtacaacgccaagcgcaggcactggcgccgcaccaagctcggcttctgagcgtggggatcggccggctcccgcgtcggaattctagggtctctacctttcctttggttttatcgatgtctcttgtgtttctgtaagctagcaaacagttccagaaagcttttgttaagattttgatgacgctaagaggattgatgctactatgctgtactcaggattccatgctgcattgcgatg

SEQ ID NO: 663 - DNA, 146 bp, Zea mays
  misc_feature: Incyte ID No: 700157330H1
cggcgttcttgtatcaagatcaaatcaggccttgaataagtgtgtgtgcatatatctttttttttaatttttatctctttttttttgtatcgagagatgtcctgaataatgtgaatttacgtgtgtttatataaacgaatttaaga

SEQ ID NO: 664 - DNA, 261 bp, Zea mays
  misc_feature: Incyte ID No: 700157331H1
atggcggagaacgagtccaagcctgacgggatcccgccatcccagggcggcaagtacgttgggttcggatccagcccaccgccgtcggctaacaggaacggcggtgctgcccagggcgatgtcatgcaggttgtctctcagggatttggacgcctttcattagttgcagcatctgctgcccagtctgctgccagtgctgtccaagttggcacaaaagaaatccaatcaaagatgagggatgggggctatgaccagaaggtg

SEQ ID NO: 665 - DNA, 252 bp, Zea mays
  misc_feature: Incyte ID No: 700157333H1
ggcacttgatgctcttaaagaactttccatgaggaagtgtatggaggaaatggaagcaataggtggattcacagaagaggagaagtcatatgccgtggaggtctttgagtctgggattaatagagaggctttcatgtcaacaatgaaccacaatgttcaaagaatgtggctaaagcgcaaaatcaggtatgtccatagttaagcatataacaaaacatagctttatgattttcgtttcagcttacatgagca

SEQ ID NO: 666 - DNA, 252 bp, Zea mays
  misc_feature: Incyte ID No: 700157334H1
  unsure 212: a, t, c, g, or other
ggaagaacaactccttcctggtgaagcagtttggcaacggcaatgccaaggtgcagttcaccaaggagcccaacaacctctacaatttacactcctacaagtactctggcttagcaaacaagaaaactgtaacgatccagccagctgctggaaaggactcggctgtggtcctctctactaccaagaccaagaagcagaacacacccgcgaantcagccacaagtctgtgatgcgcaaggagttccgcaagat

SEQ ID NO: 667 - DNA, 249 bp, Zea mays
  misc_feature: Incyte ID No: 700157335H1
aacaaacaagatcttcccaatgctatgaatgctgctgaaattactgacaagcttggtctgcattccctgcgacagggcactggtacatccagagcacttgtgctacatctggtgaggggttgtatgaggggcttgactggctttccagcaacatctccagcaagtcttgaagcttttcggcagggctcctagcgagaggatgtctgaacaacttatggctgcttttttttacatattattactaagaca

SEQ ID NO: 668 - DNA, 250 bp, Zea mays
  misc_feature: Incyte ID No: 700157336H1
  unsure 215: a, t, c, g, or other
gtttgtcggaggaggcagtccagtcactgtattctgcttgggcgtctgttccgagaggcgatggaatggctcggaaacatgtaaataaggaggtggtccacttttcagtggatggtatgaggtgctgcggcctaaaaccctgctgcagaagagacctgcaaatgtgaaccctggacgaccttccgatgctaaattatggttgcactctgtaaatnaatcatgagtgaatcaactaggcgttgaagcattg

SEQ ID NO: 669 - DNA, 119 bp, Zea mays
  misc_feature: Incyte ID No: 700157339H1
aaaacgtattactgctacttgtacattgttaggctatttccagcggggatttcgtccgagtttcaatctcgattaaatgtgttgccacataagaaaatatgataatatggcaataattt

SEQ ID NO: 670 - DNA, 252 bp, Zea mays
  misc_feature: Incyte ID No: 700157342H1
  unsure 14, 16, 26: a, t, c, g, or other
gacatttctcacananaacacaaggnacagtatgcactccgcaaactgtaccatgagagtccacgactcatttgtgttctatacacttctcccacatgtggtccttgcagaaccttaaaaccaattttgagcaaggtcatagacgagtacggcgagtttgttcatcttgttgaaattgacatcgaggaggatcctgaaatagcagaagctgcaggcatcatgggaacaccttgtgttcaattttttaagaac

SEQ ID NO: 671 - DNA, 253 bp, Zea mays
  misc_feature: Incyte ID No: 700157346H1
aagattctcggacatgtacactctcacaatagcaagtgcggatccacagtctatctctgcaaacaagccagttcatttcactaagagcgtaacaaagtggtttacaaaggaaggagttcttgtggagggcctgttctggaaggatgtcgagaagctgattgatgactacaacagtgagcgcaagagtaaatgaattggtagctcgtgtctctggccatctggggagacatcgctgtctagagaaatccgtcaa

SEQ ID NO: 672 - DNA, 257 bp, Zea mays
  misc_feature: Incyte ID No: 700157348H1
gcgagagagaacccaaacggagagagacaatcgagagagatggcaaactgttttggtgacgtcgtggacaattacaagctagacacaatgccaagatatatcggcaaaaagaagactcgagaagaccgggcacgagaggcctcctatctcagtaatgagaatgagaagtacaagaaagctaaagactatgtgaacatgctgaaggactggtacggcaatggagcgtcgaagctgtgcgtgatctacaaccagacggg

SEQ ID NO: 673 - DNA, 279 bp, Zea mays
  misc_feature: Incyte ID No: 700157349H1
caacaatgtgatcagagttggcgacattgctcggattcgtcctgctccaagccagctacatataaaagacccatctgttgttaaggtcatagaaagggcgctaactgaggacgagcggtttttattggcgtttgcagcacgccgcatggcatttgcaatctgcccaatcagactgtccccaaagcagtagacgtgtcggtcgtccttctccgagcggaaccaggcgtcatcgaggatcagcgattttcgaagctacagaaaactcatgtatgtaacaac

SEQ ID NO: 674 - DNA, 224 bp, Zea mays
  misc_feature: Incyte ID No: 700157350H1
  unsure 157: a, t, c, g, or other
aacaaagataagtaattttttagcaataaaatttatcaagtgtttgatgcgttcatggcgaaacatgtgttttgattgatgtgaattttggatctaatttttggaattaatcttgtgaagagaatctcatttgttcaaataataatgaattattaanataataaatttggtaagtatgtattttgatttgttcataataaacttgagtttatcctaattgtgga

SEQ ID NO: 675 - DNA, 276 bp, Zea mays
  misc_feature: Incyte ID No: 700157352H1
  unsure 3: a, t, c, g, or other
gtncgtcggagtcggacccgtcgtcgcaggtgtcgcaggtgttcgagaagtcgctgcagtacgtgaagcgcttcagccgctacaagaaccccgacgccgtgcgccaggtccgcgagacgctgagccgctacggcctcgccgagttcgagctctgcacgctcggcaacctctgccccgacaccagcggcgaggccaccgcgctcgtcccctccctcaagtccggcggcaggttcgtcggcgaccccggggacgagaagatcgagaagatgctcaacg

SEQ ID NO: 676 - DNA, 277 bp, Zea mays
  misc_feature: Incyte ID No: 700157356H1
gcttccggcaggattcagaatatcatcatcaatcaagcgctgaagcggcatagtgtcgatcctgaatggtggatgtgccctgccatacctgtgaaagacattaccccggcaccaccgccttcagtggcaatggccaaggtgacagacaagaagaagactaagaagaagtcactggggacaatatacgaggaggggagtcctgagcctgccaatggcgatgacgatggagctttggcactgccagagacaggattggggcttagcttgaatactgacg

SEQ ID NO: 677 - DNA, 274 bp, Zea mays
  misc_feature: Incyte ID No: 700157358H1
agtcaaatgactggctttggcggtgttgttagttttgaggttgctggagactttgatgctacgaggaaattcattgattctgttaaaataccctatcatgcgccttcttttggaggctgtgagagcataattgatcagcctgccatcatgtcctactgggattcaaaggagcagcgggacatctacgggatcaaggacaacctgatcaggttcagcattggtgtggaggatttcgaggatcttaagaacgatctcgtgcaggccctcgagaaga

SEQ ID NO: 678 - DNA, 276 bp, Zea mays
  misc_feature: Incyte ID No: 700157359H1
  unsure 266: a, t, c, g, or other
cgtcagacgtcgtcacacacaatctagcgcgtacgtacgtcccaaaccaaaccatgtccgcgagagctcttctcctgacgaccgcgacgctgctcctgctcgtcgccgctgcgcgtgcggggcagccgctcgccggcgggtggagcccgatcaggaacgtcagcgacccgcacatccaggagctcggcggctgggcggtgacggagcacgtcaggcgggccaacgacgggctgcggttcggcgaggtgacgggcggcgaggagcangtggtgtccg

SEQ ID NO: 679 - DNA, 275 bp, Zea mays
  misc_feature: Incyte ID No: 700157361H1
cagcgacgagaccaggagcaaccaccgctagatcgggcgagatggatggacagtgaagaggccatgtttgctggtccttgtggttatctaaaacgcacgcatgctctattatagctagtcatcactatatatatacttgtgtttgtgtattgttgttcttgttctgctggtgtctccgccgtttaatttgacctatgttatggagtgagtgatatatgtgccgtcactcctagtatatagtagtgagtgactagttggtatgtgtagtactgtac

SEQ ID NO: 680 - DNA, 268 bp, Zea mays
  misc_feature: Incyte ID No: 700157365H1
caatgattgtggacttagagactttgacatggaaaaatttcgaatatgcaaccacttccattttgcttggcctgtgaatcatacatcgttgagcccagatggtaaacttgctgctattgtgggggacagtcctgatggacttctgattgacgctaattcaggaaagacggttcacaaactccatggccatttggattactcctttgcgtcggcatggaatccagacggacgaacattcgccacggggaaccaagacaagacgtgcagg

SEQ ID NO: 681 - DNA, 265 bp, Zea mays
  misc_feature: Incyte ID No: 700157368H1
ccgctctccacgctcgacgacaacccgctcatcgacctcgccatcgacggtgccgacgaggttgaccctgacctcaaccttgtgaaagggcggggtggtgctcttcttcgtgagaagatggttgaggcagcatcggacaagtttattgttattgttgacgagacaaaactagttgatgggttaggaggtagtggtctagccatgccagtggaagttgtgcagttctgctggaagtacaaccttgtaagattgcaggaactgttta

SEQ ID NO: 682 - DNA, 263 bp, Zea mays
  misc_feature: Incyte ID No: 700157369H1
  unsure 259: a, t, c, g, or other
atctattataggctacctcatgtttggagacaagatgctctcacaaataactttcaatcttctgaaagattcatttgcagcaaaagttgcacgatggaccacgataactattattgtcggtttctctgattcaattaagtgggaacccttggtagtgattcaattaagtgagaagtgagaaccctcattgtgctatttttgtttcaggtgatcattcctttcacaaagtatccttacacatcttagtatcaactctgtnagtg

SEQ ID NO: 683 - DNA, 268 bp, Zea mays
  misc_feature: Incyte ID No: 700157371H1
  unsure 19, 133: a, t, c, g, or other
agaccctgagcggcagggngactggcgccggatggagcagcaacgggaccttggagacttgatgagcatgctgcgttcagggttcaacagcaatattgaggacgacagtggcgggcttggagacaccgaagangggggagaggaagctgaaatgactccggcctccataaccatggtcttcatcatgccatctagaggctcaatcatgcagtacctatcggaacgcagcagaacgatcattctggtcagtcggaagcgagcaagcagc

SEQ ID NO: 684 - DNA, 267 bp, Zea mays
  misc_feature: Incyte ID No: 700157373H1
  unsure 231: a, t, c, g, or other
ggactattgatctggggaagctgcaccttgggatgccctttgcacaaggtgcctttgggaagctctacaggggaacatataatgggatggatgttgctattaagcttttggagcgacctgaggctgaccctgagaaagctcaactgttagagcagcagtttgtccaagaagttatgatgcttgcaacactgaggcacccgaatattgtcaagttcattggtgcatgcaggnagccattggttggtgtattgtgaccagagtatgcaa

SEQ ID NO: 685 - DNA, 84 bp, Zea mays
  misc_feature: Incyte ID No: 700157375H1
  unsure 58: a, t, c, g, or other
cttaccgtacatgtctcaagttgtatgctctctgtttgtatgtggagagatttctganagtgaatccagtatctgaatcgactc

SEQ ID NO: 686 - DNA, 63 bp, Zea mays
  misc_feature: Incyte ID No: 700157376H1
ataataaatagatcttctttgtgccttgctttgtttgatatatataataaaagtcttcgttgc

SEQ ID NO: 687 - DNA, 121 bp, Zea mays
  misc_feature: Incyte ID No: 700157377H1
  unsure 38, 54, 57, 90, 94, 97-98, 104-105, 108-110, 116-117: a, t, c, g, or other
ggaagaaacaaggtgccacgacattttcattaactgtnaattacattgttgatngancggcaataacatatttgcttctccaattttaanaaanaannaaaaannaannnaaaaannaaaa

SEQ ID NO: 688 - DNA, 270 bp, Zea mays
  misc_feature: Incyte ID No: 700157378H1
ctgccagccatgtgcagtgctgcgagtggagactagagagaaaacagaagagaggagagggccggccgcggcctggccgaacggaaccggaggtagggtaggcgggccccacccccacaagctctacgctctacgctctgctctgctcttctctactcctgcgtgcgtggtctctttcctcccctcttcatccagatccggacccgaccgccgatccatccaaatcacccttccccttccaccaccaccaggccgccgcctcgtgtcctc

SEQ ID NO: 689 - DNA, 105 bp, Zea mays
  misc_feature: Incyte ID No: 700157380H1
taatcttgcagttatggaaccttattatattgtatcctgcaatttgtttttttgcaacttataagagtaattttatttgatgagtcttatgctgatagtctctct

SEQ ID NO: 690 - DNA, 263 bp, Zea mays
  misc_feature: Incyte ID No: 700157381H1
ggccagtctgttcgagctctccctcagcgtgctcatggagaccatcgcgcagaccaagacgtcgcgcgccgacgacgcggacgacgccgtgtcgcccgaggcgcacgagttccggcggatcgtcgacgagatcctgccctacctcggcgccaccaacctgtgggactacctgccgctcctgcggcggttcgacgtgctcggggtgaggaacaagatcagggacgttgtcggcaggagggacgccttcctgcagcggctcatcg

SEQ ID NO: 691 - DNA, 261 bp, Zea mays
  misc_feature: Incyte ID No: 700157384H1
cacaaagggaggaaaaagaccacagatactgaaactggaacagctgttggctctgtatctcttggtgcaatgcaacataaaatggctaaaatgaaacccaaggaagttgatatgaacttctacagatttcagaaaagagaagcccacctcagtgaactggcaatgttgcagagcaagttcgagcaggataagaaaaggatacaggaacttagggcccagaggaaattcaagccttactaattctgctcaaatcttaaagat

SEQ ID NO: 692 - DNA, 59 bp, Zea mays
  misc_feature: Incyte ID No: 700157385H1
gtggccttgtctgtcattggctacaacgttctagataaaaaaacatttaaattttgtgg

SEQ ID NO: 693 - DNA, 261 bp, Zea mays
  misc_feature: Incyte ID No: 700157387H1
gtgaatgagtacatcgactcagctgtgagacacgtcctcctcagacagggtgttctgggtatcaaggtgaagatcatgcttgactgggacccgaaggcaaggttggcccgatcacccctcttccggacctggtgaccatccataccccgaaggaggaggacgagctgcgccctcctgtcttggcagctgaggtctaaggtcccaacagcgtcctcgaaatggcagtttgatcgggtcctagctaggtttgatcttatgata

SEQ ID NO: 694 - DNA, 267 bp, Zea mays
  misc_feature: Incyte ID No: 700157389H1
  unsure 14, 121, 198, 207, 236: a, t, c, g, or other
aagaaacataaganacacaaagagaaagatagagacaaggagaaggagcagaagaaacacaaacatcggcataaagatcggagtaaagataaagataaagataaggacaaagacaaagatnagaaaaaggacaagagtgggaatcatgattcaggtggtgatcattccaagaaacatgagaagaagagaaagcaagangtaactggnagttcagcaaatgtccaaaattacaaganaacacaaaagcacaaaattcagtgaaatgta

SEQ ID NO: 695 - DNA, 261 bp, Zea mays
  misc_feature: Incyte ID No: 700157390H1
  unsure 89: a, t, c, g, or other
gctcctatctggtataggacggagctgagcttctagcaacgtacagtgtatccgccatgagtcctttcggggcggtgatcacgccaganaccctcaagtacatgtccaagtaccagggacgtgagatcacgcaggtggactgcgcacgggaggcgatgaggctgatccacgcggaagacaagaacctcaaggccgaggactcagcgtgggagctgaagaagaattcggcaacggcgtgacaccatggtctcgtctacaacg

SEQ ID NO: 696 - DNA, 264 bp, Zea mays
  misc_feature: Incyte ID No: 700157392H1
atacataagtacatataaccaactaggcttgatcgatctctcgacagcaaatagctagcaataatggagaagtacaccaaagccctagcgtcattgctcaccatgctggtgctggcacctctcctcgccatggccaccgacccagaccccctgcaggacttctgcgtcgccgacctcaacggcaagccatcagtgaacgggtacccatgccagccgccgtcgtcggccggcgaccagttcctcttctcgaccaagatcgccacg

SEQ ID NO: 697 - DNA, 264 bp, Zea mays
  misc_feature: Incyte ID No: 700157393H1
accttggtgtccctgtgtttgtgtttgagacactggaggttcagaatgcagtgttgatattttaccccctccggccacatgatttagtcgttttggacggagggagtagacgttattgagtcataataaaatgcaatgtgcacggtgggagactgggaggataggaattatagttgtttattacgactgcttactgcatccagattgtgttgtcccttgtctggtgttgcttctgttgcttgctgcgttgcagtgccggagtga

SEQ ID NO: 698 - DNA, 264 bp, Zea mays
  misc_feature: Incyte ID No: 700157394H1
  unsure 16, 36, 67, 84, 98, 102-103, 159, 196, 198, 212, 215, 243, 247, 261: a, t, c, g, or other
ctcctcttcctcctcntagcacagctagcgcctgcnccccttcggctgtgatcatgtcttgcagcancggcaagtgcaactgcngctccagctgctcnttcnncagctcatgcaactgcatgtccccttacgtggagaccgccgccgccagcagcatcnagaccatggtcctctctgcgccgaccaccaatgccancnccggcggcttcgangcngccaccgagggcgtctgctgcgactgcnacanctgcaactggggantag

SEQ ID NO: 699 - DNA, 258 bp, Zea mays
  misc_feature: Incyte ID No: 700157401H1
atcggcgataccacatccaagaatcatgggtataattcgtgagtgtggtgggaagatgcatatggctgagaggcagtgggatgaggctgccactgatttctttgaagctttcaagaactatgatgaagcaggcaatccgcggagaattcaatgcctaaaatatcttgtccttgccaatatgttgatggagtctgaagtgaatccttttgatggacaagaggccaagccgtacaagaacgatagtgaaatccttgcaat

SEQ ID NO: 700 - DNA, 91 bp, Zea mays
  misc_feature: Incyte ID No: 700157404H1
  unsure 8: a, t, c, g, or other
gtgctgtnttcatcctcggctccagcagacccatgcatcaaccagcatggactgtggatcgatggatgctgttactcctgtcaggaatttg

SEQ ID NO: 701 - DNA, 253 bp, Zea mays
  misc_feature: Incyte ID No: 700157405H1
gtcagcgacgaggtgagctcgtcgaccttggctccctttgtgagcctggcgctccatcctatcgctgtctctccgcacaccatgggcatctgcgcgtggttccggcaggagcagcgtgaaccgtccccgtatggcctggcttttcaacaaacattcccaacgatctgggaacacgctgacgacgtaaacgccttactgaacaaaggcatggtcgcggacagccgcttcctgatgccaattatgctcagggagt

SEQ ID NO: 702 - DNA, 254 bp, Zea mays
  misc_feature: Incyte ID No: 700157407H1
  unsure 210, 225: a, t, c, g, or other
cctcggagctgagattgacaaaatgtccccaccggagctaatcaagcagttcgagcaggtcctttctttgaactcaggggttggccacttcgtcaagatcttccctggtgtggcgcatggatggagcgtgagatacaaccacgacgacgcagctgccgtgaagagtgctgaggaagcctttgcggacatgctcgactggttcaacaagantctgaaataaactcngcaattgcatcctgccttgtaataatggg

SEQ ID NO: 703 - DNA, 259 bp, Zea mays
  misc_feature: Incyte ID No: 700157410H1
agcatatggtgagcaagcagctcaaaccaatgcgagctatgggtaccagggagctccagcagatcctaactatggaagtgcctacccacagccaggatatggtcctcctggtcaggctactggtcaggctggttatgcctcctcagcagccagccagcctgcgtatggccaggcaggatacacccagccgcctacaaatcctccaggttatgagcagtctgcggcaccagcaacaacccagagcggctatgctgcgccc

SEQ ID NO: 704 - DNA, 258 bp, Zea mays
  misc_feature: Incyte ID No: 700157413H1
  unsure 67, 112: a, t, c, g, or other
cctaattgagcttgagcctaacaacagtgggaactacatactcctgtcgaatatttttgcagaacangaaaggtggggtgatgtgagcaaacttcgaaaggctatgagaganaggggactgagaaatgtgccaggggcgagttccattgaagttgatggcatggttcatgagttcacttccagggattggtctcatcctttcatacatacaatatgtgaagtgttatgtgagatcgacactaacatgaaatctgttgg

SEQ ID NO: 705 - DNA, 262 bp, Zea mays
  misc_feature: Incyte ID No: 700157416H1
  unsure 4-5, 19, 21-22, 30, 46, 63, 87, 91, 93, 95, 104, 129, 132, 146, 205,207, 216, 232, 235, 241: a, t, c, g, or other
gctnnggttgcacctgacnanngcgcggtngcagaatacactgcancaggcgctgacaactgnggcggtaaatggggtgctagcganctgnancnccagctgcnagcattccagctgctggcgcagacnggnctgctgctccagcncctcctgctgacggtgtctgggacgcagctgtggctccacctccaacagcagcccccgnangggaacaangcgcggcccccgttgnggngtcganccctacctgggagtaattaat

SEQ ID NO: 706 - DNA, 252 bp, Zea mays
  misc_feature: Incyte ID No: 700157417H1
  unsure 45: a, t, c, g, or other
gactgactgcctcgagcagcagagatcagggaggccgagggcggnatgacgatccggttcgtgctgttcgtcaacaagcagggccagacgcggctggcgcagtactacgagcacctctccctcgacgagcgacgggccctcgagggcgagatcgtccgcaagtgcctcgcccgcactgaccagcagtgttcgtttgtggagcaccggaactacaaggtcgtttacaggcgctacgcctcccttttcttcctc

SEQ ID NO: 707 - DNA, 245 bp, Zea mays
  misc_feature: Incyte ID No: 700157418H1
  unsure 149, 226, 228: a, t, c, g, or other
gtttgccatggcaaacggtgtcatctccaagaagttacatgggaagaccagcgaaggggacatcatacaactcaccatccatgctttctgtccggtgctcggaccgacaaagcgctcggccacaaaagttggaccgtggggtgggagcngcgggtctccgatggacatcacggcagagccccagcgtctgaagagcatcaccgttgtactggcatcgcgtgacctnantgcttctccaaggggag

SEQ ID NO: 708 - DNA, 247 bp, Zea mays
  misc_feature: Incyte ID No: 700157421H1
attgggcgacgctttgatgatccacagacacagaaagagatgaagatggtgccatacacaatcgtgaaggctccaaatggtgatgcttgggttcaaacaacagatggcaagcagtactcaccaagtcaggtcggtgcatttgtgctgaccaagatgaaggagacagctgaatcttaccttggcaagtctatctcaaaggcagtgattactgttccagcttatttcatgacgctcagcgtcaggccac

SEQ ID NO: 709 - DNA, 156 bp, Zea mays
  misc_feature: Incyte ID No: 700157422H1
  unsure 62, 83, 93, 99, 147, 150: a, t, c, g, or other
gcccaaacctagcgatcgcagagagttgcgcccggaccccggaccgcgccgacccggctcgnaaactcctccacaaccctcgncgccgccggntgctcnacccccgccaccgccatgggtaaattccgcaagcttggccgcgattantcncaacgg

SEQ ID NO: 710 - DNA, 249 bp, Zea mays
  misc_feature: Incyte ID No: 700157423H1
  unsure 212: a, t, c, g, or other
taacaaatatcctgcttggagaagggcgtggttttgagattgctcaaggaagacttggtcctggaaggttacatcattgcatgaggctagtaggagcagcagaacgtggcatgaatctgatggtagagagggccttaaacaggaccgcatttggaaagaggattgcacagcatggttcctttttatcagatcttgcaaagtgtcggattganctggagcaggcaaggcttttagtccttgaagctgccg

SEQ ID NO: 711 - DNA, 252 bp, Zea mays
  misc_feature: Incyte ID No: 700157424H1
  unsure 249: a, t, c, g, or other
gtcgtggtgaagtcttggattctgcagtgcattcttctttgttagctgttgatcctgtgaagtatgttaacaaaatgtccaacggtcaaatgctgctatgaagtgcaacctcagatttgtcaatcgaggtcttgctgctatagctgaaaagagagcttgctgatttgattcacagaaatagtgaagtaacataacccggcatgtaggtagctctcgaccacttttgggcaagatttgattcggtcccanggt

SEQ ID NO: 712 - DNA, 253 bp, Zea mays
  misc_feature: Incyte ID No: 700157425H1
gatacttacttggaagcaatgtctgtcacccacttcaagaaaaaatatgaggagtatgatctaaaaggtgatgaacaagaacaaattgaccgattggctgaggacggtgatatctacagtaagctggcaaggtccttggcacctgaaatatttggccatgaagatgtcaaaaaggcactgctgttactacttgttggtgcaccccatcggaagcctcgcctttggactttgtcattcgtccacagtccaaaat

SEQ ID NO: 713 - DNA, 209 bp, Zea mays
  misc_feature: Incyte ID No: 700157426H1
cacggatttgttaggtctccccttcttacaagggttcttcgtcgtgtcctctacccctccccgcctatgtatgtgctgtgaaatcgttgatgttctcgtcgggtgaacaaaggccagtagctagcttgcctgcttcataaatcgtgccggattgtaatgggcctcttagatttgacgcccctattttggaatatagttgtatcggtgcc

SEQ ID NO: 714 - DNA, 252 bp, Zea mays
  misc_feature: Incyte ID No: 700157427H1
gttacaacaaagaaatgggagaaaattgttgatttcgatgaccaccttgatgatattagcaaggattggtcgaacccaggcctccttgactgaattttcatgattgatctcgctatactgttttggaacttcgctagaaatgaggtggtgaagctcgtcctgctgtgctatggatttctctcagtcgcaacgagttgtaagcactaagcacggatttcattttaatgtaaatgagtgattttgtaacaatta

SEQ ID NO: 715 - DNA, 226 bp, Zea mays
  misc_feature: Incyte ID No: 700157428H1
cgaggatagctgaaatagcaatcttcttcaatgtcttattatgcgggagcttgaaaatacttcaatttataagtttataggttttcatgttggagcatctttgtcatggtagcatgtaggttgctaaaatagtcagtggaataatgagacaatgtctaagaacacttgtcttttttttaggacagtataataagaactgacgtttccatgtccatatggacgttcc

SEQ ID NO: 716 - DNA, 254 bp, Zea mays
  misc_feature: Incyte ID No: 700157429H1
accatggccaagggtatcgggaatggcatacccataggagctgtagtaacgacgccagagatcgctcaggtgttgacccgcagaagctacttcaatacctttggtggtaaccctgtcagcactgcaggcgggcatgcggtgctcaaagtgctggagaaggagaagctccaggagaatgcgtttgttgtgggctcctacctaaaggaacagcttaacaatctgaaagacaagcatgagatcatcggtgacgttag

SEQ ID NO: 717 - DNA, 93 bp, Zea mays
  misc_feature: Incyte ID No: 700157432H1
  unsure 27: a, t, c, g, or other
agtgatttctaagtatgaacggcaggnagttgacggacatcagtcggctatttaaaaaatatctcagttgtggttagaatatgccacagttct

SEQ ID NO: 718 - DNA, 162 bp, Zea mays
  misc_feature: Incyte ID No: 700157433H1
  unsure 56: a, t, c, g, or other
cgcctcggtggctggtcttgaagggccgcctcgcggacgccagggctgtgctaganaagacctctgccacgccagaggaggccgccgagcggctggccgacatcaaggccgcggcggggattccgaaggcctcgacggggacgtggtcaccgtacccaacaa

SEQ ID NO: 719 - DNA, 244 bp, Zea mays
  misc_feature: Incyte ID No: 700157438H1
gccatcctcactctcttctactatgctatatttggatggagaaagaggaaaccaacaggaagattccagctctcaaattgatttgctctgtaagtgaagtttgacggattcatcatatgtgccccctgagtggtagttcagttagcatcttagaaatgtatatgatcaacaaaaccaaaccaatccaaaccaaatcatcttcccaaagagttgaggaactgcaaatgatcaactctgagacctt

SEQ ID NO: 720 - DNA, 197 bp, Zea mays
  misc_feature: Incyte ID No: 700157439H1
  unsure 28, 195-196: a, t, c, g, or other
cccacacacgggactccggccgcgagancccgcgactaagccaggacgcgggacgccacagccaccggcctcagcatccgcctaggacgaataacccttctaggctgccgccgccgccgtccttagctcatattgttgccggcgaagagcgccccagatccgcccctgctatggagtcggcggtgaaccgaaggnnt

SEQ ID NO: 721 - DNA, 69 bp, Zea mays
  misc_feature: Incyte ID No: 700157440H1
  unsure 2, 67: a, t, c, g, or other
cnaacaaagaagaagacaattacacgtttcacctatatatgtatccactctagtattacagcttgantg

SEQ ID NO: 722 - DNA, 247 bp, Zea mays
  misc_feature: Incyte ID No: 700157443H1
  unsure 53, 128, 202: a, t, c, g, or other
ccaccgccgaccgccgcgccgcctgcaactgcctcaagaacgccgccgccggntgcagggcctcaacgccggcaacgccgccagcatcccctccaagtgcggcgtcagatcccctacaccatcagcanctccaccgactgctccagggtgaactgaaccctaaacgacgacgacgggcgacggcggccacctgaagacgatncatatctatcccgccgtacgtcggcgcccgcggatcggaccgtca

SEQ ID NO: 723 - DNA, 248 bp, Zea mays
  misc_feature: Incyte ID No: 700157445H1
  unsure 189: a, t, c, g, or other
gggtctgatgacaattttataaacatgtttattgctgatggcaaatatcaaaatctctcgattggatgtgtcactccttaaggaactccttagctcaagctgctgattagcactagagatggcaatagagatggcaacggataaataccttatgggtattgtcatcccatactggtatccaagaataanacttgtgcttgcagttgggtacaaaatcatgttcgtattcgtgtccatgatgcagataa

SEQ ID NO: 724 - DNA, 249 bp, Zea mays
  misc_feature: Incyte ID No: 700157446H1
agcatttgaaaaacagagccctttattggaggagtgccttagggaattttattcgacatatgatgataccctcgtgcagtggaatggggctgaacttatgacaagagtgataagcaatatttctagcagagcagatgaaaacagggggcatcttgacattaagttggagccctttgttaaattttaccctataagctctactgatattatacgatatttctcagagcccgataacatggtccaaaaagc

SEQ ID NO: 725 - DNA, 250 bp, Zea mays
  misc_feature: Incyte ID No: 700157447H1
cactagatggcagtcatgttagagagcgtcttcaacatataataaaatctgaggggctcagtgtagatgacggtggcttgacagccctagtgcggttaagcaatggtgatatgaggaaggctttgaatatattgcagtcaacgcacatggcatcccaacaaatcacagaagaagctgtctatctttgcacaggaaaccccatgccaaaagatattgagcagatagctttttggctattaaatgaaccatt

SEQ ID NO: 726 - DNA, 254 bp, Zea mays
  misc_feature: Incyte ID No: 700157448H1
  unsure 2, 252: a, t, c, g, or other
anccgactctccatcagccacgtcgcgcgcccaggagaaggagctctttaatctgtgctagcagcggccccagagaatgcggcagatctcgtcgctgctgcagggcctggcccggtcactctcggtggggagggataggaaagggaacggcgcaggcgacggcaagaccgccgtgcccgtgccggcggtgctgcggacgtcgggcaccctgtggggcgacggctcggacacgttcgccgccgtctgctcgcngt

SEQ ID NO: 727 - DNA, 273 bp, Zea mays
  misc_feature: Incyte ID No: 700157451H1
cttaagaatccagtgaacaagtggcgatgcggcgcgactcctacttcgtctatgatgactgtgaagcgatggtcgcgtggcccttcagccacccaaattggaaagcccgctgttcacatggctagcgttgacttgaaaggaaaagcatacgatgtgttgagacagaattcttccagctttttgttggaagatgtctacagaaacccaggcccgctccagtttgaaggaccaggtgccgattcaaagcctatttcattgtgcgttgaggatcgg

SEQ ID NO: 728 - DNA, 270 bp, Zea mays
  misc_feature: Incyte ID No: 700157454H1
  unsure 178, 202, 212, 223-224, 230-231, 240, 246, 253, 260, 266, 269: a, t, c, g, or other
atcgattcagcgtcaggaactcttatcatgacaaccaatcacacccaatgtgcatgagcagattatcgagagcatgaagggccttaacatgcggacctacatgctcgcaaagaacatcgtggagccagctcagcaggcagctcggtgaggttagcggagtacagttttgaggcgccangaactagttaagaggtagaggtcnattgtgtggnagtgaattcgnnaccggnnttgaccacntgggcntgggagntggcttnccgttnggng

SEQ ID NO: 729 - DNA, 268 bp, Zea mays
  misc_feature: Incyte ID No: 700157457H1
  unsure 44, 266: a, t, c, g, or other
agtggttgttgctgaggatgggaaggtgaaaacgttccctgtgntcctattgcccaaggagaagcttgttgacaccaacggcgcaggtgatgctttcgttggaggcttcctctcacagttggttctaggcaagggcattgaagactgcgtgagggcaggttgctatgccgcaaacgttatcatccagcgcccgggctgtacttacccggagaagcctgacttcaactagtgcaaaaactgaggcacgtcatgagagggactgttancc

SEQ ID NO: 730 - DNA, 267 bp, Zea mays
  misc_feature: Incyte ID No: 700157460H1
  unsure 23, 113: a, t, c, g, or other
cgccagtccccaccacgctccanaccctcgcctccgattcgcgcctgcggcagaggggatggctgcggaagcgagcacggcgggtgcggcgtcggcagccgaggcgaaccctntcgccgtcctcttcgtgtgcctcgggaatatttgccggagtcctgctgctgaagctgtgtttcggaccctcgtaagcaagcgtgggcttgactccaagtttctcatagactctgctggtaccatcgggtatcatgagggtaataaggcagactc

SEQ ID NO: 731 - DNA, 268 bp, Zea mays
  misc_feature: Incyte ID No: 700157461H1
cacaggcacaacttgctcagatgataaatgagaagccacaggtccttcaggagtatgaatcaggcaaggcaatccccaaccagcagatcattagcaagctcgagagggccctgggaaccaagttgcgtggcaagaaatagctttcctacgagtttgtgtcccggagcatcataatagggggaagacaaggcaagctgtctgcttatttgtctatgtttggtatctcaagtcctgcggactgtttctgttggcacaagagggaataaac

SEQ ID NO: 732 - DNA, 267 bp, Zea mays
  misc_feature: Incyte ID No: 700157462H1
  unsure 41, 55: a, t, c, g, or other
ggggctgtcattctcggtgacagcttcctcgacaatctacncaccagcatggttnatttatttgtttatttgtgttggcaccatcgtcatcttggtgtctctgtttggctgcattggagcagggacaagaaacacctgctgtttgtgtttctatgctttcttggtcatattgttgatccttgctgaagctgcagctgctgcattcattttctttgaccatggctggaaagatgtaattccagtggacaaaacacataactttgatgg

SEQ ID NO: 733 - DNA, 268 bp, Zea mays
  misc_feature: Incyte ID No: 700157467H1
  unsure 6-7, 40, 195, 255, 267: a, t, c, g, or other
cgagannccagccagccatggcgctgcgtgccctgtaccncgagatccggagcatgaaggtccgcgacgtgccggcttacctgaagccgcgcttgacctgggacaacgtcaagaagagcgccgaccaggccgtcgaccgctacatcgagaagtacatcgacacgagctcgccggaccctctctaccacgtctgcntcgggagggatgatcttctcctacttcgtcaatctgccctgggagcgcgcccacctcgcncacctcgaggana

SEQ ID NO: 734 - DNA, 268 bp, Zea mays
  misc_feature: Incyte ID No: 700157468H1
  unsure 41: a, t, c, g, or other
cgggcgtccccgtcccgagtcaccaccgacccaagcaaccnccgcacgcaccctgccagcggccccccaactcccaacccaacccctactccagctagctcgcggcggcggccagcggccatggccttccggctgagcaacaacctgatcggggtcctaaacttcgtcaccttcctgctctccgtcccgatcctgggcgcgggcatctggctgggccaccgcgccgacggcaccgagtgcgagcgctacctctcggcgcccgtcatcg

SEQ ID NO: 735 - DNA, 161 bp, Zea mays
  misc_feature: Incyte ID No: 700157470H1
  unsure 37: a, t, c, g, or other
gttggttaatattattaggacaatattgagggagcgncgaaagtcaactgtctgtatttccaactgattattttgctgttcgatactcaactcccgttcacttggcagcacaatggcatatctgatatttctaatgttgaattacctttacggctttactt

SEQ ID NO: 736 - DNA, 261 bp, Zea mays
  misc_feature: Incyte ID No: 700157474H1
  unsure 80, 85, 176, 231, 249: a, t, c, g, or other
cgagcagtaccgcatgaagctgcacaagtcgaacgagccgctgctggcgctcgtcaagtcgagcctggacatcgtggtgnccgtngggctcctgcagctggccccgaagaaggtgaccccccgcgtcacgggcgcgtttggcttcgccagctccctcatcgcttgctaccagctgnttccaagcccaccagcaaagcagagcaagtgaggactcccactccaagcactgtntaccaggaaaataatccnccccggataggt

SEQ ID NO: 737 - DNA, 186 bp, Zea mays
  misc_feature: Incyte ID No: 700157480H1
  unsure 13: a, t, c, g, or other
gcaaggtgttaanccgattgcatcacaaggtggggaagcccatagctgtcatgatctgggagagagcagtccatctaaatgtatcaaaggctttagcaaagtctagtttgatcaccaaagctggttgtttgcatttggtacaggtctggatcagctcaagggcttaggcgaagttttccgaaatgg

SEQ ID NO: 738 - DNA, 265 bp, Zea mays
  misc_feature: Incyte ID No: 700157481H1
ggccggggaaagaagagactgaacagagtgttcgacgccattggctttgtttaccccgactaccgctacccgctgcgtggacagggcaaaaagagaaaagctgctacttcggccaccccagatgagcatgtgccaaagggaaaaaagttgaaggttctgactcaccggccgcgttacatcgaaccggccgtgatacctgaatttggcgaaggggcctcttcggctgccaaagcaaaagaaactgttgctcctgcgtagataaccc

SEQ ID NO: 739 - DNA, 262 bp, Zea mays
  misc_feature: Incyte ID No: 700157482H1
aaagactctccagtgaaggtgaatggatttgcctgcaaggaccctatggctgtgaacgctgacgacttcttcaaggctgcaaaacttgatcagccaagggacaccaccaaaagcaaggtgggatccaacgttactttgatcaatgtcatgcagctgcctggactcaacacgttggggatctcgttggctcgcattgactacgcaccactaggtcagaatcctccacacacacacccacgtgccactgagattctcaccgtgc

SEQ ID NO: 740 - DNA, 259 bp, Zea mays
  misc_feature: Incyte ID No: 700157483H1
gaaaaacatctcacgccacgcctgctgcagcacctcgctctccgctccgttggccccatggagtccgtcgcgtccgccgcgatcgccaccacctcccgctctctcccgctccccttctcttctaccccggtccaccgccggcgccgtgccgccttcctccccgttgccgcctccaagcgtcacgacgacgacaaggaggccgcgaaagggtccggctcggaaccacggcgcgagctaccagcctcgcgccgtacggact

SEQ ID NO: 741 - DNA, 259 bp, Zea mays
  misc_feature: Incyte ID No: 700157484H1
  unsure 32: a, t, c, g, or other
ggaagatccatgtcagactcgtcagggagctnccagaagaaattcagcggcaaggatgtggtaattgttgctacacggaggattgtgaggccacccaagaagggttcagctgttctgcgccctcgcaccaggactctgactgctgttcacgatggcatcttggaggatgttgtctacccagctgagattgtggggaagcgtgtcagataccgtctggatggttccaagattatcaagattttcttggacccaaaggaga

SEQ ID NO: 742 - DNA, 259 bp, Zea mays
  misc_feature: Incyte ID No: 700157486H1
  unsure 34: a, t, c, g, or other
caagaggatgataaaatcgacaaaatctatgacncctctcggcattaacatcattcctcgagacggttctgccatatcaacggaccaacccaacgaggatgtggaagagctaaacctgatgtctccaatgcgcaatggtgaagaaggcaacggtgacttcaataacttgatggacttggaatcggaaaattcacctgatggtatttctattgctctgaacctgggagagcgggagccagaaagactccgctctgtttcc

SEQ ID NO: 743 - DNA, 258 bp, Zea mays
  misc_feature: Incyte ID No: 700157487H1
  unsure 257: a, t, c, g, or other
ccccaagtttcttagggtttaatgttgtgccacctcaaattttttgttgactgaatgcccgtgcaaaagttgttactacatttttttgtattgggtgctgcatgaagctagctatagcatagtttctttaagtagttgtcatgatcctggtattatttttcttgttcatgtttttttcaggcaatgtatgaaggcatacttgttgacttgccatttgcaacgttcttcttgagcaaggtgaaacaaaaatacaattng

SEQ ID NO: 744 - DNA, 253 bp, Zea mays
  misc_feature: Incyte ID No: 700157489H1
  unsure 63, 80, 90, 107, 131, 150, 170, 185, 191: a, t, c, g, or other
gaggagattgcttggttggagcctggaggacctggtgaggagaggtcgcgaacatggagaacnttgctctgctttggagnatcatcggcncgggcgtgtccggtgcnatcttcggggccggatggtggttntgggtggacgcggtcgttngcagcgcggtccaggtctcntccctccactacctnccaggnatcttcgcttcgctggcggcgatcatgttcaattgcgtgaacaaggatgagattggatacga

SEQ ID NO: 745 - DNA, 255 bp, Zea mays
  misc_feature: Incyte ID No: 700157490H1
  unsure 177, 179, 214, 241, 244, 251-252, 254: a, t, c, g, or other
agcccgatcagcagacagcaggcatggcgctcccggaggccgacgacggcgcggtggtcttcggcgaggagcaggaggcgctggtgctcaagtcgtgggccgtcatgaagaaggacgccgccaacctgggcctccgcttcttcctcaaggtcttcgagatcgcgccgtcggccaacncntgttctcgttcctgcgcgactccgacgtgccgctngagaagaaccccaagctcaagaagcangcnatgtcgnntnt

SEQ ID NO: 746 - DNA, 257 bp, Zea mays
  misc_feature: Incyte ID No: 700157491H1
caacaataaaaggatctgcaactttcttctctccatatagcttcttctcctcactgagcttcttctccttagccatcttttcctcggtcatcgtcttctcctcagacatggagcaagcacgtctttaaaccgaagctcaaaaatcaagcaagagctggtaagcaagagttaaaaatttgagaaaataacgcaaacagcagaaatggcgcatcaaatgctgccgctgtgggttcctatttatacgcctagtgctttgc

SEQ ID NO: 747 - DNA, 259 bp, Zea mays
  misc_feature: Incyte ID No: 700157493H1
  unsure 132, 258: a, t, c, g, or other
caagttgaacccgctgaagcagcacaaaatcgcccctgatctagctgccacttgcgttcctgcataccaagaagttggtggtgctagtgcctcgcaaagtgccattgaggcccagaaagctactgctgcggnatctcagctcactcgcagtggttcatcaagggcaatggaaaatgcacaggacggcggggagaggaagtaacgagatagagttcgtatttttttatcgtctatgctacatcttatggatgcatatgnc

SEQ ID NO: 748 - DNA, 81 bp, Zea mays
  misc_feature: Incyte ID No: 700157495H1
  unsure 29, 70: a, t, c, g, or other
tgacctttcacttcgtatgctggcatctnagtccattaagtgttaatgttacagttattcttggatcaanatcattcgagt

SEQ ID NO: 749 - DNA, 273 bp, Zea mays
  misc_feature: Incyte ID No: 700157504H1
  unsure 61, 146, 153: a, t, c, g, or other
cccgcagacagcgccaagaccgtgcgcaagccggtcttcaccaccttcaaccagttgcgcncccagatgcatggccacactcctgccgttcgcgtcgtctccgcccgcaccatcctcgacaaatcttccatgcacattggtcgcanccacacngccaagtgcctcgtcggatacaacaccggcacgtcctcatcacaccgcaacaattaggatacactcacggtgtgtggtgtgtatgtgtggaggaagagctgacggaggtgaggagagaat

SEQ ID NO: 750 - DNA, 279 bp, Zea mays
  misc_feature: Incyte ID No: 700157505H1
  unsure 183: a, t, c, g, or other
gcttctcataactcatcatacctggtgaaactattgctaactttaattaaacaaattagtagcttctacagtaattgaactgcgtgatggacctgtctgcaattaggatgtggtgtgtacatcacataccatggagcgttattgtaaccttttttaagaattttgattacaccaacacaaaanatattcgcatttaatggatgctcataggtcattcagttttcgatcgtataagcgaaatgctcagcaaatgtgttgtggttattaccatacacaatg

SEQ ID NO: 751 - DNA, 276 bp, Zea mays
  misc_feature: Incyte ID No: 700157508H1
gttgcagttcatccgtgaatacactagcaaggtggacgatttagtgaaggacaaaatcgagtcacagaatgaagaaagagccaaagagaaggaggagaaagatcttgtggctcagcagaacatgtatgcgcaactgcttcctcttgctctgcctgctccgccaatgcccggcatgggtggccctccacctccgatgggcggaatgggcatgcctccgatgggcgggatgggcatgccgccgatgggccctggtccgatgcagcatcgggatgcaca

SEQ ID NO: 752 - DNA, 172 bp, Zea mays
  misc_feature: Incyte ID No: 700157510H1
  unsure 163, 169: a, t, c, g, or other
attttttatatgaccctgtaaaattcttagttcagattattgatgtctccgtcacgtacctgaacgatgtagacgtacatatatgtaactgattaatgtgtatcaattgaccacgaattatttgggaaaacctcagttgcaaaacgccttttatttaatcacnatttcnatc

SEQ ID NO: 753 - DNA, 276 bp, Zea mays
  misc_feature: Incyte ID No: 700157512H1
taggcccttacttatgggaagtggggctgttcttggtcttgcacctgctcctgagtatacattcattatatttgtctctcctgttggaaactactttaaggaaggtttagcaccaataaatttgatagttgaagacaagttccatcgtgctactcctggtggtactgggggtgtgaagaccataggaaattatgcttcggtgttgatggcacagaaaattgcaaaggaaaagggttattctgatgtcctctacttggacgctgttcacaagaagta

SEQ ID NO: 754 - DNA, 279 bp, Zea mays
  misc_feature: Incyte ID No: 700157515H1
  unsure 144: a, t, c, g, or other
agctcatcagcaagtctacgaagtcttcgaagtcaaggaacacaaagcggttgaacttggaggatggagaggctgaaaatcgagctaaagccgagagagaatcgtggggcgaaaatcccttctacgacaaaaactacagatacnaaaccagttcaaaatccactcagcagtttgaagatgaccttgctcacgagcctcatgcaagctttagttgcgtcggaccgaagacgacattcccatatttctgactctgaatattgtacttgttacatccatgta

SEQ ID NO: 755 - DNA, 282 bp, Zea mays
  misc_feature: Incyte ID No: 700157516H1
cagccaggcgctgagacattccagatgaaaattgctaataataaggtgggattgattattgggaagggtggtgagaccataaagtctatgcaggccaaatctggagcccgcattcaggttattcctttgcatctgcctgctggtgatacttcaactgaaagaactgtgcatattgatggcactcaagaacaaattgaacatgcaaagcagctggtggctgaggttaccagtgagaatcgggccaggaatccaatgtctggtggctattctcagcagggctat

SEQ ID NO: 756 - DNA, 272 bp, Zea mays
  misc_feature: Incyte ID No: 700157518H1
  unsure 263: a, t, c, g, or other
aagaacttggaatttctgattgggtgcatggatgatctttcatcagagcagaacaagttccaatattataaccgcaatctctcaagacaacagtcacagcagcaggcatggcttcaaaagagaaggcaggagaacatggcgaggaaagcagctggtgaggagccactaccagaagaagatccatccaatcctatatttaagcctattcctgagccctcacgattggagggctatctagtaactaatcagatctgcagttactnaaccatatc

SEQ ID NO: 757 - DNA, 129 bp, Zea mays
  misc_feature: Incyte ID No: 700157519H1
  unsure 120: a, t, c, g, or other
tccgtgttccgtgtccgcgtccagtgtgtccgctactccgctccccctcagtcctcagttcctcacctagcggtaggtgacgcgcgggagacgtagatggcggcttcggaggcggcagcngcggcggca

SEQ ID NO: 758 - DNA, 269 bp, Zea mays
  misc_feature: Incyte ID No: 700157521H1
  unsure 23, 209, 240, 245: a, t, c, g, or other
acgaaaactacaaccctgtaganaggaggtcaaagggatgcaaagaacgtgtctcaaagggttccaataagccatctaaatcattgcaagccaataggctttctggtgctgatccaacagatggaggccatggagttgggaaagtatgtaacactttttctgaagagcattacatagaacagattcagaagttgtctgaaaagattgcngacctgaaagtttctgtcgatagtactgaanaaganagagacttctacttctcgagttgg

SEQ ID NO: 759 - DNA, 270 bp, Zea mays
  misc_feature: Incyte ID No: 700157523H1
gatggatgcaaaattaccaattgatacatttgaaaatgtaatgggacttgcaatagaagggtgcaaagcaattgcaacttacatccgagaggtgctattggagaatacaaagaagcttgagtgtcagcgtggttaaccttaggagtgcaggcaggttgatgacctgaacctacccaacaccggacatcacacagccattaagggcttgttcggttagctcttaatccatgtggattgagtgggattggatgagtttgaatcccaaacaat

SEQ ID NO: 760 - DNA, 271 bp, Zea mays
  misc_feature: Incyte ID No: 700157525H1
cggaaaaattggtgacttcattaaaggagtgtttgccgtcttcctagacttggatttctcatttcttgagatgaatccgttcaccatggtcaatggggagccatatcctctggacatgagaggagaactagatgacacagcagctttcaagaacttcaagaagtggggaggtatagaatttcctctaccttttggaagagtactcagccctacagaaagtttcatccatgaactagatgagaagacaagtgcctctctgaagttcacggtt

SEQ ID NO: 761 - DNA, 262 bp, Zea mays
  misc_feature: Incyte ID No: 700157526H1
  unsure 251: a, t, c, g, or other
tacaactgcaggcaattccagtcaagtgagtgatggtgctggagctgttcttctcatgaaaagatctgtggctctgaagaaagggctgcccattcttggtgttttcaggagctttgcggctgttggagtggatccagctgttatgggcgttggtcctgccgtggccattcctgctgctgtgaagtctgcaggccttgagattggagacattgattgtttgaactgaatgaggcttcgctctcagtttgtcnattgcgcaaca

SEQ ID NO: 762 - DNA, 190 bp, Zea mays
  misc_feature: Incyte ID No: 700157527H1
  unsure 42, 44, 138, 160-163, 166, 170, 177, 179-180, 183, 189: a, t, c, g, or other
gatcgattcaagcctcacaccctcgggaattccgtgtaaggngntaataaagcagatgggcgttcctggctgagaacatgatctgaactcgtgacccccctttttctgtggttctgtattttgtctgatttgctaganataaaaggaacacatgctaaannnnaanaaanaaaaaanannaanaggaang

SEQ ID NO: 763 - DNA, 269 bp, Zea mays
  misc_feature: Incyte ID No: 700157529H1
gctttgtggtacttctggaactgtatcttgccttgctgcgtactttgtctgcaatacaatattcagtgccatcaggacaatcataggcaataaaaattattacgacatcaggaaaccatgcatcggaagcctatgctatgatttctctaatttggagaaatttctcaacctcaaatctgtcagagagagcctaggggttggagatatagagtttgtttcatgcagcccaactgtctatgaggccatgctattagattggatgaggaacc

SEQ ID NO: 764 - DNA, 266 bp, Zea mays
  misc_feature: Incyte ID No: 700157533H1
  unsure 246, 248, 252: a, t, c, g, or other
cgctggccatcgagctggtgcggcccaaatcgccgacgcagccgcagtggaagcgggtgttcacgcacgggcccgacgccaccgacgcctggctgtggaagcttgccaaggcgcacgtggtgacccacgacacggggtaccaccagctggtgagccactggctgcgcacgcactgctgcgtggagccctacatcattgccgcgaaccggcagctcagccggctgcacccggtgtaccgcctcctgnancganttccgtacacatgg

SEQ ID NO: 765 - DNA, 260 bp, Zea mays
  misc_feature: Incyte ID No: 700157538H1
  unsure 20, 53, 85: a, t, c, g, or other
ggaaacagtagttgcaagtnctgccgagcagcctgatgaagactatgagtcanataccggtcttgactcactggatttgcctgangtcccaaaagctgcaattcgtccaccttctgacgcaccattgaccccagatatttgcccacatgttcagggctctcagtccatttctcatgagttctcagatctggtaacttggaggagaatccaacagctggtggtgttttaatgtatccagatgaaagttggagcacttgttt

SEQ ID NO: 766 - DNA, 266 bp, Zea mays
  misc_feature: Incyte ID No: 700157545H1
gaacaaacctgctgttcactcagttccagttgaggttgagcgtattgacattggtgaaccagaaaatccaggcccaaaatacaacaacaggagtacatatcaatctgttaccgtagacccatttgccctttcacctgatccaaatgagcaagagaaccttgacatacttggtgacgatgatggcaatgcttcaccaaacaacttggctgcaggacaagaggcatctgttcgtggttttgacatcaacttaccaaatcaggacgata

SEQ ID NO: 767 - DNA, 266 bp, Zea mays
  misc_feature: Incyte ID No: 700157546H1
ctcatgtgtgttgccttccaatcagtaatagtaatcagcaattgtctgccatatctcctacaagtatattttccagttctattgttttctcttgatgttccagcaacatatcacattcaggtaatcgctctgcatttcaattcatgtgtacctgttatttcaattcagaggaccagaggttgagagggggccatagtggtttcaggccacttctctactatcgaccaatcagaggttatattcaagtaattgttcatatgtggaac

SEQ ID NO: 768 - DNA, 267 bp, Zea mays
  misc_feature: Incyte ID No: 700157547H1
  unsure 40, 136, 169, 247, 256: a, t, c, g, or other
gatgctcgtcgtcggcagccatggttacggagccattaanagggctgttcttggaagtgtgagcgactactgtgcccatcacgcgcactgcaccgtgatgatagtaaagaagcccaagcagcacaagcactgatcnatgccgactgatcactacgtgtactgcaaatantttgtactactgcaaagttatgtgtgcgtccgtccgtttgtgaataattgggtcatcaaccatcacatcttcggttgntctacaagnatccgatgcaa

SEQ ID NO: 769 - DNA, 269 bp, Zea mays
  misc_feature: Incyte ID No: 700157548H1
  unsure 14, 49, 117, 145, 178, 202, 209, 225, 235, 261, 268: a, t, c, g, or other
caaacaatggaggnaaaccatttacagatcaaatgttcactcgcatcanggaggtgcatgatagggaaaaagaggtgcataccttgggatattcagatgagcagatatctgagttgnaggaggagattcatagaactagggatgnacagcttgcacagataaccagcatggtcgaggnaaagctaaaccgcactgtggagangctgcancagcagtcatggaggnacagaacgcnaggctggaggccgagaaggtggcgcntgaactnt

SEQ ID NO: 770 - DNA, 138 bp, Zea mays
  misc_feature: Incyte ID No: 700157550H1
  unsure 13, 26, 30, 35, 52, 68, 86, 89, 97-98, 101, 105, 118, 134, 136-137: a, t, c, g, or other
aaccaaccacctnactcgatctctcntcantcgcnagtccagctatcaccanccagacagagctcggntgcaagctgccaacccanggngacagatnngtncgcngatggcgggtgcncggaggcgtcgtggangnng

SEQ ID NO: 771 - DNA, 137 bp, Zea mays
  misc_feature: Incyte ID No: 700157551H1
  unsure 2: a, t, c, g, or other
anttaattaagcaaccgagctctcctacccagttcagcgaactcaccgacgccgacgacgatgaccctgacggccttgggtcttggactagcactcctcgctgcggccagcccgtgcttggggttggggagcagcgg

SEQ ID NO: 772 - DNA, 136 bp, Zea mays
  misc_feature: Incyte ID No: 700157552H1
  unsure 35, 55, 91, 103, 110-111, 115, 119, 127, 131: a, t, c, g, or other
gtgagatgttggcttgcaagaaggtatttcataantgtccggaaggcctcagtgntaatacagtctggtattcgtggcagtcttgttcgangatgtaatggcnatattgnnctantaantgtgctangagngtttg

SEQ ID NO: 773 - DNA, 136 bp, Zea mays
  misc_feature: Incyte ID No: 700157553H1
gaagggcgcgtattgggaggcgagctcaagcgatggccgtcgtgcaccccctactaattcggggggaaaggtagaaaaggaactaggtattatatggcctacacatatcacaagaaggccagattcagatttcaag

SEQ ID NO: 774 - DNA, 135 bp, Zea mays
  misc_feature: Incyte ID No: 700157554H1
aaagcgtcgaacagtgtgccgatgataatcagagacataaggacagcacatgattagctcttaacatgtttggcttccgaactggcttttctcgagatccccaaggaagaagaagatccggtcagatatgtgtcg

SEQ ID NO: 775 - DNA, 138 bp, Zea mays
  misc_feature: Incyte ID No: 700157556H1
  unsure 2, 134: a, t, c, g, or other
anagcatacgaggcagagaaagccaagaccgagctactgacgaagaagcgccagagggaagagaggcgtgtgagataccgggaagaagataagcagaagaaacgtgcacgcagatgagtccagtgaggcgaggnaagg

SEQ ID NO: 776 - DNA, 137 bp, Zea mays
  misc_feature: Incyte ID No: 700157557H1
caagaatccacagatgatgaatccaactatgattttgagtacgaggtcttgtctcatggatccgatgaccagtgggaatttattggagagacaagtacatccagaagatttgagagaccaaatgagcctgatggtgc

SEQ ID NO: 777 - DNA, 137 bp, Zea mays
  misc_feature: Incyte ID No: 700157558H1
atgctatgcagcttgagtgttatctgtggaccatatggttagagatgttagcatgatggcttcttctgtcaaggtcattcaaacacggtttcatctttgctggctgtggttctggtgtttcagtaatgtcattcaat

SEQ ID NO: 778 - DNA, 139 bp, Zea mays
  misc_feature: Incyte ID No: 700157559H1
  unsure 56, 88-89, 93, 97, 109, 127: a, t, c, g, or other
ggagttagtttggttcctggcttctgctttgctggctctgcctgtcttcattatanacaggcttctagtagggaccttctgctccaannagantaanaggcctcgtagnagtaatggtaaccatggnccacaagagatt

SEQ ID NO: 779 - DNA, 274 bp, Zea mays
  misc_feature: Incyte ID No: 700157560H1
  unsure 253, 263: a, t, c, g, or other
cttgaatggacccgttaaggccgagccaactgccggtggcattgccaaggtacatagtatctgccagttcgtctaatttcctgtctgtccgctgggctgttgtgtatatatgatcccctttctctccaccaattcctacacagggaaaatcgagttctttgacaagacgttttgtttatcctttgacagggaaaccgagttctcgacacgatgtccgccgtgtggacggacgagagacacatgctgtatatangctccatggnggcttctttcg

SEQ ID NO: 780 - DNA, 129 bp, Zea mays
  misc_feature: Incyte ID No: 700157562H1
  unsure 97, 99, 104, 108, 110-112, 114, 116, 119, 122, 124-126, 128: a, t, c, g, or other
aactgaactcaggttttttttaagaaaaaactgtccaagattggattgcttgttaaagctaaatattgttattgacgtgttattgcttaaaaaaaananaaaanaaanannnananaanaanannngna

SEQ ID NO: 781 - DNA, 242 bp, Zea mays
  misc_feature: Incyte ID No: 700157568H1
  unsure 11, 29, 60, 63, 121-122, 151, 182, 190, 198: a, t, c, g, or other
aactgcctgcnggagctccgcgtcgccancgccacccaccccatggcgggcatggctgcntcnccggacgaggtgcagctgctgcagctcctgatcgagattcttggcgccaagaacgccnncgaggttggcgtcttcaccgggtactcgntgctcgccaccgccctcgccctccccgacgncggcaagnttgtggcnatcgacgttacccgcgagagctacgaccagatagggtcgccggt

SEQ ID NO: 782 - DNA, 260 bp, Zea mays
  misc_feature: Incyte ID No: 700157570H1
  unsure 63, 152, 163, 167: a, t, c, g, or other
ggaaggagtctgaatactctggccattctattcctgttggtggtcttgcttactatgtaactnccccatcaagtttggctgatgtccttgcaaatccattccatgcactgttttatgtggtcttcatgctgtcagcctgtgctctgttctcnaagacatggantgangtttctggttcatcagcaaaggatgttgctaagcagctcaaggaacaacaaatggtgatgccaggccatcgtgagtcgaacttgcagaaggaa

SEQ ID NO: 783 - DNA, 263 bp, Zea mays
  misc_feature: Incyte ID No: 700157572H1
cgacggcatcagtcggctcaaaacggttacgatgatactgtacgaggtgctcaggctgtacccgccggcggtgacgctgaaccgaagaacgttcaaagacatgcagatcggaggcatcacgtaccctgcgggggtgatcctggagctccccgtgatcgtcgtccaccacgaccccgacgtctggggcaaggacgcgcacgagttcaggccggagaggttcgccgaggggatctccaaggcgaccaaggaccagcagccggcgt

SEQ ID NO: 784 - DNA, 262 bp, Zea mays
  misc_feature: Incyte ID No: 700157578H1
  unsure 46, 61-62, 76, 85, 119, 124, 139, 145-146, 149, 151, 154, 162, 164, 169,176, 180, 190, 195, 201, 205, 221, 227-228, 233, 252: a, t, c, g, or other
agagcgcctacttcgaccggtacgcggcggcgccaactcgctcgcntccggctactcccgnngcgcggcgctcggngccgagatngtcggcaccttcgtgctcgtgtacaccgtcttcnccgcnaccgacccgaagcgnaacgcnnganantcngacgtccngnttctngctgccntccncatcggcttngcctnttcatngtcnacctggccaccatccncgtcannggcanggcatcaacccggccaggngcctgggcgc

SEQ ID NO: 785 - DNA, 128 bp, Zea mays
  misc_feature: Incyte ID No: 700157579H1
  unsure 13, 96: a, t, c, g, or other
cgcgcccactganaccatacgcacacgggtgggccgaagcgacgttctccgtcaattacgtgtcgagctaatcttattattgtttctattattatnataatgcttctccctgttcctatggacctata

SEQ ID NO: 786 - DNA, 129 bp, Zea mays
  misc_feature: Incyte ID No: 700157580H1
  unsure 4, 7, 14, 16, 41, 56, 63, 76, 84, 96, 101: a, t, c, g, or other
gtcnacnacctagntnccatttttgggcttcatatagctgnctctgtgcctattgntgtgctngcatccaggccanggcctatnatggctgggacnggatnctttgaggccgtaataagtgccaagggc

SEQ ID NO: 787 - DNA, 250 bp, Zea mays
  misc_feature: Incyte ID No: 700157581H1
  unsure 47, 52, 65, 92, 96, 108, 133, 138, 145, 148, 150, 165, 167, 171, 176,178, 185, 189, 204, 208-209, 225-227, 236, 238, 245-246, 248: a, t, c, g, or other
tccactcctcctggcagctcctcctcgcacagcacgtctcctctccncagcntccctctctttcnctgtccttggtcctctccccagaagcntcgntctctctttctntatcccctggtcctctccagataantgacncagtggncangnttgacaaggagagananaggngttgnanacctganccgngcgcgccgggccggnagtnnaggcgaaggtggaaannnggaggggtntncttcggnnangg

SEQ ID NO: 788 - DNA, 239 bp, Zea mays
  misc_feature: Incyte ID No: 700157582H1
  unsure 22, 24, 29, 31, 39-40, 43, 60-61, 77, 100, 104, 107, 110, 122, 128, 134,166, 174, 178, 187, 199, 204, 216, 223, 227, 231, 235: a, t, c, g, or other
ttcagggccgtggagctcagcngngtgcncnacgctcannaanggcgtctacgcgtaagnnttcggcgacatggcgngctcatgcagctgatgaagatgnacanctnggntaagggttcgtncaggancgatcnatgcaggtgggcttcggtaccatggaatggcngtctgatntcgnagtgtagantcggttatggangcagntgttatacgcanatgaatnttcnatcngctnccaa

SEQ ID NO: 789 - DNA, 118 bp, Zea mays
  misc_feature: Incyte ID No: 700157583H1
atttcagactttggtttgagtgcacttccaaactgcaagagaaaagatgggttactccacacaatttgtgggactcctgcatatgttgctccagaagtaattagtcaaaaaggatatg

SEQ ID NO: 790 - DNA, 116 bp, Zea mays
  misc_feature: Incyte ID No: 700157584H1
  unsure 11, 16, 20, 22, 30, 35, 50, 73, 77, 83, 87, 97, 101: a, t, c, g, or other
ggttgggagantaacnatancntgtactgntgcangaacagcaagagtancagaggttatggagatgataganatcntttacngggntgttcataanaacnaggacaccatcacca

SEQ ID NO: 791 - DNA, 118 bp, Zea mays
  misc_feature: Incyte ID No: 700157585H1
tagcaaacaaggttgctgttcttcttgcagcgttcatgcctatgctaagtgactcaaagagtgaagatggatctggtgacagcagttaattggacttctttaaaaatatgttagtaat

SEQ ID NO: 792 - DNA, 248 bp, Zea mays
  misc_feature: Incyte ID No: 700157587H1
  unsure 159, 204, 220: a, t, c, g, or other
cacaaggtcgggaagggtttccgcgagctcaccctctccactcgcgcacccgccgccgcttcctttatctcacgcacccgtcgtcgcctcctctccctcgcgcaattggggccagctgttgggacgacgttgaggacgagggcgatgacgtggtcggcntcctccactctgtggagacaaccaaggcggtcgcggtggcggtcntagcatgcaaccccantgagtcgactcatacggcagctcgacgc

SEQ ID NO: 793 - DNA, 261 bp, Zea mays
  misc_feature: Incyte ID No: 700157589H1
  unsure 26, 29-31, 40, 51, 57, 70, 87, 102, 116, 132, 146-147, 157-159, 162,170, 177, 198, 211, 226, 240, 257: a, t, c, g, or other
gatcattcacatgcctcattgatgcnaannncatcccagntagtcgtcganccgatnattcaacagtggnaacctcgtgaggatgcnacccgtattggttcngctggtgttgtgangaggcaggccagtggntatgtcaccgctgnngagggtgaannnggngctctaantcctcanccactggtgcagggagagtgntttccggcacatnaaaaccattgaggantgcttgcagctgcnctgattaaccgttgccnaggg

SEQ ID NO: 794 - DNA, 253 bp, Zea mays
  misc_feature: Incyte ID No: 700157590H1
  unsure 149, 198, 206, 216, 226, 241-242: a, t, c, g, or other
agttgtatgggtttgttcttttttctataatgatacacaactgtcttttcgattctaggtacgtctatccagtcatagaaaagctcaccgaacagatattgaaatatatggagattgctaacataatcgataaataaaacaagtataanaataaaagatttatatgcatcatatcagcaatcacatgttacgggtaanagagagtnttctatgcanataaaatccntggatgctgctacannggggggaacaa

SEQ ID NO: 795 - DNA, 256 bp, Zea mays
  misc_feature: Incyte ID No: 700157592H1
gtacatgactgcattctgtcacctcgctcccagtgtgtgtgtatatatatcgtcctccgacactattgtatctgcagttccttcggttgctaacatctctagccgagacatttgacttgaacaatctgctcatctaccactccggcactcccacgccgggccgcgcggatcgcatcgagtttgagtggagtaggcggcgggcagcgaatcagcgatgaaggtgcagtgcgacgtgtgcgcggccgaggcggcctcc

SEQ ID NO: 796 - DNA, 276 bp, Zea mays
  misc_feature: Incyte ID No: 700157593H1
  unsure 92, 178, 214, 220-221, 225: a, t, c, g, or other
ccgagctccagcgtccctcacgcgtccaggcggtgtccgcctacttgtggaaggtcctcgccgccgtcgtggccgcgtgccgcgtgcccgangagcggtgctgcatgggctggatggtggacgctcggcggcgggtgaagttcgcccgagctgatccccgcgatgcgcaactaacttncgggcaacgtcacgggcctacgcgctggggcggcangggccnntggnaggaagattccggccggaaaaccgcttggcccgaaggttggcgggccaatt

SEQ ID NO: 797 - DNA, 258 bp, Zea mays
  misc_feature: Incyte ID No: 700157595H1
  unsure 99: a, t, c, g, or other
aaagaagggcactggaggcattactatcaagaaaactggcatgtccttgattatcggtatctatgatgagccaatgactccagggcaatgcaatatggnggtggagaggctcggcgattacctgatcgaacagggcttctaagtttgtcataatgctattttggtcattgggcacttaagtttgcacctcatttggttctgtaatatgtgggcttgtgcatgtgcttggcgtattgcatgcagtgaataatttatctt

SEQ ID NO: 798 - DNA, 155 bp, Zea mays
  misc_feature: Incyte ID No: 700157601H1
  unsure 7, 37, 109, 136, 144: a, t, c, g, or other
ccccgangcattggcagccctcgtccgcgagctctcntctgctgctcccccaacctccgccgcggcttcctctaccgtgagcaacggcgccgcggggccggcctcggcnattgcgcccacgttctcctccggcctncgccgtcnctagggtgctg

SEQ ID NO: 799 - DNA, 274 bp, Zea mays
  misc_feature: Incyte ID No: 700157605H1
  unsure 46, 74, 76, 78, 85, 109, 131, 136, 152, 168, 172, 209, 211: a, t, c, g, or other
ggtcattccacttccaccaatctgtctcccaatcgttcttgctgcnccaattcgctctctttactcggccagcngnangggagangagggcgagatgacggtggagaangtggacgcggggctttccgacntcgangcccacttcgatcgcntcttcgcttccccggncgcngcctccgacggcaaggtgaagctgctgctcttcctgncngaccgcaagcctggctcctccctctcctggtgccccgactgcaacgtggcggatcggtgatct

SEQ ID NO: 800 - DNA, 276 bp, Zea mays
  misc_feature: Incyte ID No: 700157606H1
agaatctgcagtactatgaaatttctgccaagagcaactacaactttgagaaacctttcctgtaccttgcaaggaagctggctggtgatccgaaccttcactttgttgaagctgttgctcttaagcctccggaagttaccatcgacatggctatgcagcagcagcatgaagctgagcttgctgcagcagctgcacaacctcttcctgatgacgatgatgatctgattgagtagaaaggatcatgagtcttgaacttgagcaggagttgtgccttgc

SEQ ID NO: 801 - DNA, 254 bp, Zea mays
  misc_feature: Incyte ID No: 700157608H1
acaacgtcatgtatctccgaggcgttccagaggatgcagagatagaggatgcagagtgagaagatgcgatcaatgttagattgataaatgtaatatggttctgacatctatgttcgaatatgccggtgacaagtagatctatcggatcgctttgttctcttgagtgatgaaacatgatggcggtcgggctaagggtgaagctgctttcagttagactatgctgtcattctgctgaatatatatcagatttcttg

SEQ ID NO: 802 - DNA, 278 bp, Zea mays
  misc_feature: Incyte ID No: 700157610H1
  unsure 214: a, t, c, g, or other
ggagcagcatggcttgagtacgacaaatcttcagattcctgaggctatggtcaaactggtcatcgagaggtacacgagagaagctggtgtgcgcaatcttgaacggaacctagctgcattggctcgtgcagctgctgttaaggttgcagagcaagttaaaactcttagacttggcaaggaaatacaaccaattactacaacccttcttgattcnaggcttgctgatggtggtgaagttgaaatggaagttattcctatggagcatgatatatcaaaca

SEQ ID NO: 803 - DNA, 161 bp, Zea mays
  misc_feature: Incyte ID No: 700157615H1
gtcgatcatatatgcatgtttgtacgtgtttgtgtcataataaatcgatcgatcatgttgtttaccctttttatttcggtatgtagttgcatctgcgggcgggctaaaataaatcacggcaggctgggcttcatcaagcccatgtatccagctgtgtgtaa

SEQ ID NO: 804 - DNA, 271 bp, Zea mays
  misc_feature: Incyte ID No: 700157617H1
  unsure 9, 269: a, t, c, g, or other
aagcgaganaggaaccagctatttatgttcaggctacaggcagcttctctttttttccttctttctcgtattcacaattttagtgaggaggattgtcgagctgaccggtgggagaaaccagtcgagaatttagtagctttgcaccagatgccatttgcttctgtaaatcacacattatctgcttccgtgtgtagaatggtaataactcgtcccagctccatgtacttttgacagtgtgctcgacttgcggggtaaaaacagagaaaagnat

SEQ ID NO: 805 - DNA, 269 bp, Zea mays
  misc_feature: Incyte ID No: 700157618H1
  unsure 65, 199, 220, 251: a, t, c, g, or other
aggtatactccctctatattgcacctgtcctaaatgatttcgtctggttcttgccaccataagtnagattctcatagaatcttcataatcattttgcaggcaacacacaaacatatatgtgattatgaacccttcaatatagaacagaagttttggctcatatgagctaccagcgcatcagtaggcaattcgatttgtnatcagcaatatttagatctgnttctcaggggtcctgctagagtaacattttnccactgttgtttatgtat

SEQ ID NO: 806 - DNA, 272 bp, Zea mays
  misc_feature: Incyte ID No: 700157619H1
  unsure 40, 63, 87-106, 115, 256, 268: a, t, c, g, or other
gcaggcataatagatctaagaagaggagcaggagctccangatgaagaagaggaggagccagnatacagcatcggagcaaagctctnnnnnnnnnnnnnnnnnnnntagtaaganaaagaataagggcttgaagaggaagcggacaagcgatctgattctgaagaatcggtcccttctgatgccactcctgatgatgtaaaagaaattgaagaaactaaagtgccagaaattgatccagaagcaatcaagttcaangaaatccttganggcc

SEQ ID NO: 807 - DNA, 268 bp, Zea mays
  misc_feature: Incyte ID No: 700157620H1
agatactgatttgaattgtataggcgactgggttgtcgagtcagttgtcaagaagaagcttaacgtccttagtgtccatttgacaagctcaaagtcattggtcggtatcacaggggttatatcagagattcatcaggaaaggaagggccgagatgtatatatactgggttccgcaaatgttggaaaatctgcatttatcagtgcaatgctaagaacaatggcgtacaaggacccggtagcagcggcactcaaaaatacaagccaatac

SEQ ID NO: 808 - DNA, 271 bp, Zea mays
  misc_feature: Incyte ID No: 700157624H1
  unsure 69: a, t, c, g, or other
gtcgtcagcggcaaatctgcggagatgaacggcgggagcgagtgcgcgcgtgccgtctgaagctgccgnacttgtgtcctcaacaaaccatatgcatgcgatccgtacatgtgattcggttgagactgttgccgcgcgcaacggcctgtgatgtgtcgagcaccaaggagacggcatgttgttcgtcgtcgtcgttctctcattcatgtggggttataggctagccgcgcgccgtcgtagctgatgctgatgtactaggaaaaccttcgtt

SEQ ID NO: 809 - DNA, 83 bp, Zea mays
  misc_feature: Incyte ID No: 700157626H1
gatgactggaaaacatttcatacgctcacttattttgtaagctctctgttatgtgtttgagatcgatggggaaaagtttagct

SEQ ID NO: 810 - DNA, 273 bp, Zea mays
  misc_feature: Incyte ID No: 700157627H1
gtttttttcaatatgtgtggacataactgataatgaattggcatacttggaatgcattcacttgtttgtcgagatattggaccatttctttagcaatgtttgtgagctcgatttagtgtttaattttcacaaggtttacctgatactagatgaatttattcttgctggggagctgcaagaaacaagcaaaaaggcaataattgagcgaatgggtgaactggagaagctggaatgacgaagaccaggaagatgctgccgcgtgtgttgtattcc

SEQ ID NO: 811 - DNA, 277 bp, Zea mays
  misc_feature: Incyte ID No: 700157628H1
  unsure 17, 27, 58, 82, 90, 121, 146, 153, 164, 169, 171, 178, 194, 199, 212,221, 243, 247, 276: a, t, c, g, or other
gagtcgccggcgccgcncgaggatgancccggcgccgctggccctgcggaggaccccnaggactacgacggcggcccgcccncgcgccantcgtctgccccggcgtctcacgcagccggtnccaaggccaaggcccgtgtccatanggagcancaggaggatgncgacnangacgatnaccagattgaggtcgnccgcnagaagcttcccancatcactgncgacccagacaagctcgctaanatgnattcgatactttcccaatttacacaacant

SEQ ID NO: 812 - DNA, 278 bp, Zea mays
  misc_feature: Incyte ID No: 700157629H1
  unsure 275: a, t, c, g, or other
acggaacactattgatagagcctaaaccacaggaaccaacaaaacaccagtatgactgggatgttgcgactacgtttgcttttctacagaagtacggtcttacaggagagttcaagattaatgttgagtgcaaccatgctactctatctggacacagctgccatcatgaattggagactgcacggattaatgggctgcttggaaatatcgatgcaaacactggtgatcctcaagttggttgggacacagatcagttcatgacagacattgcagangct

SEQ ID NO: 813 - DNA, 278 bp, Zea mays
  misc_feature: Incyte ID No: 700157630H1
  unsure 55, 68, 71, 91, 137, 150, 210, 216: a, t, c, g, or other
gggacaacctcctcgagaacaagaccgccttcaccaccaagaaggactacgggcnggaagagagggangcncagtgggccaccgcgcagangacactgcacgggctccagccgccggatgttcctccaacacgctgntcaacgacaagancagctaccgcgagctgtccgagatcgccgagcaggccaagagacgagctgagatcgcgangctganggagctcaacaccctcaagggccacgtggagtcggtggtaactcaagggctggacatcgaca

SEQ ID NO: 814 - DNA, 283 bp, Zea mays
  misc_feature: Incyte ID No: 700157631H1
cgaacgtcgatgaagggttacgtggttatttgacaaagtatgactgcagttcagctgatgtaaaccccattggaagtgtaagtaagcaagatctgagagcttttttacgatgggcagcaattcatcttaagtattcttccttggccgaggttgaagctgcaccacctactgccgagcttgagccaatacgagcaaattacaatcagttggatgaaatagacatgggaatgacatatgaggagctgtctatatatggaaggttaaggaaaattttccgatgtgg

SEQ ID NO: 815 - DNA, 264 bp, Zea mays
  misc_feature: Incyte ID No: 700157634H1
  unsure 15: a, t, c, g, or other
tctggagttaaaaanggaagaaatcgttcaactcgcacacgagttatgtgatgagttccaggcgcttggcaagccaggagatgctgctagagtagcactggagtactgttcagatgctgaaagaggtgtaagctactatatcatggcaagggaatgggaagaggctcttagagtcgcttacatgcttagcacgcatgatctggttgaagctgtcagagacgcagcttcagaatgtgccgcgtcactgatatccgagtaccaggt

SEQ ID NO: 816 - DNA, 265 bp, Zea mays
  misc_feature: Incyte ID No: 700157636H1
  unsure 56, 163, 227, 232: a, t, c, g, or other
gcagcgctgctccgcctaagcagaaggacgctgcctcctcatcctcgtcgccctcngcggcggcaccagcagcagggcccaagtgcctgtggcagagccgccgcgccgacagcgcgcacaaatcgctgccgggcctcgtcctcgccatctgactgagactganactagctagagatagcaagctcgatctgccgccctccattatattatattataaccgtataaanatccnaaaattccaaaccctctactacttgcataaatt

SEQ ID NO: 817 - DNA, 264 bp, Zea mays
  misc_feature: Incyte ID No: 700157637H1
  unsure 49, 56, 168, 223: a, t, c, g, or other
ggaggatgctggttttgattggaaaattcttggtccagatgttcaagangttgatnatgttgcatgggtttgcgatcaggatgcttatgcttgtagcggtcagaaatgctctgctcagtctgttctattcatgcacaagaattggtcttctagtggtctgcttgaganaatgaagaaactttctgtttggtggtgaaccgttagcgaatcactcaattcccanaatttatggtgccatgaagccgactgctgtagttgttcctc

SEQ ID NO: 818 - DNA, 265 bp, Zea mays
  misc_feature: Incyte ID No: 700157638H1
  unsure 7, 54, 71, 79, 117, 136, 165-166, 185, 190, 210, 244, 246: a, t, c, g, or other
ggaagtncgtcaacttcccggagatcgtcggagcggtccagaacgctgggttcnaggtcatcccgatcganccgcgtanagacctcagcgtggaggacttcgcccggaccgtcgacncgtgcgacgtgctcatggncgcgcacggggccggcctcaccaacttcnncttcctccgtaccaacgcngtgangctgcaggtggtgccgtggnggcacatggagcacccttccatggcgttctacgncnggccggccaaggagatgag

SEQ ID NO: 819 - DNA, 266 bp, Zea mays
  misc_feature: Incyte ID No: 700157639H1
  unsure 25, 96, 188, 206, 247: a, t, c, g, or other
ctcgctcagggacgtcgccaccggnaggtctccgtgctctacgacgcacggcaaaccatcgctgacctcgccacgcccgtcgtgcaagacagaaanggcgtgtccgcctcggagtccgccgtggtctgggccgatgtcagcgccgcaatcctgaacaaggactgggaggcggccaggcaggcgaacgncgggtggaggagacggcnaggcggctcgccaaggagaggaacgagcgctgggaggtgtngactcccagcccacttctt

SEQ ID NO: 820 - DNA, 267 bp, Zea mays
  misc_feature: Incyte ID No: 700157640H1
  unsure 88, 143: a, t, c, g, or other
cttccttctgacgcccaagctcctacctgatctggagtacagcgatgcctgcagcattctcaacattatgaacggcccatggattgangagccagcaaaagcttggagctccggtgattgttggaggacagtggtcagcgcantggaacactgagcgccgagtattttgccttggaccgtaggaggcttgtaaagtttagcgtgtagagctggatgcagcttttgggtggttaatttaagtttgtagttgtactacatgtaagttta

SEQ ID NO: 821 - DNA, 267 bp, Zea mays
  misc_feature: Incyte ID No: 700157641H1
ggtggcgcctcgggaaaactacataaacaatctgctcaaggatttggacggggccatgaagacatcgactgcggcgtggaaggttgccgtgggccaccataccatgaggagtgtcagtgatcatggtgacaccaaggagctactgcagctactgcttccagtcctccaggccaacggcgtcgatttctacatcaacgggcatgaccactgcctggaacacatcagcagcagagacagcccaatccagtacttcacaagcggaggcgg

SEQ ID NO: 822 - DNA, 268 bp, Zea mays
  misc_feature: Incyte ID No: 700157642H1
  unsure 20, 33, 61, 88, 91, 116: a, t, c, g, or other
gtggttggttcgccaacccngacagagggcganacttattcttcaggtgatgtcgtctgangagggtgcacacgtcacttgtttcacngangatcttcacgatgtaacacttcacnttcagatagtgaggttttctaaacagatatacgtgtgggttggatgcaacacagcaaagtttggccatttatatgctgctgcaaccactagaccggataacagagtgagtgttacctctgtactaggaggaacatctgataacaccggttct

SEQ ID NO: 823 - DNA, 270 bp, Zea mays
  misc_feature: Incyte ID No: 700157643H1
ctctccgcgcgaccgatctaccgccgccgccaccatgtcgctgatcgccggcgaggacttccaacatattctgcgtctgctgaacaccaacgtggatgggaagcagaagatcatgttcgccatgacctccataaagggtgttgggcgccgcttctccaacatcgtctgcaagaaggccgacatcgacatgaacaagagggccggtgagctgacgcctgaagagctggagcgcctgatgacggtcgtggccaaccctaggcagttcaaggt

SEQ ID NO: 824 - DNA, 270 bp, Zea mays
  misc_feature: Incyte ID No: 700157644H1
ctccggttgtgcatggatgctacagccttcggtgcgtctgaaaatagatcatgtcgtcattacccaggtcttggtctggtttgtatataccaccatccttatacctggttatgtgataagtcataagtgacaaaaaaactgctcatcatcactttttccaccaaagataatcagaaacaatcagaatgaccgacaaagcatgcttatgtccatttgaaacttactattttcgcataaggcatactcggttcctcaggaaccatgcttgga

SEQ ID NO: 825 - DNA, 275 bp, Zea mays
  misc_feature: Incyte ID No: 700157645H1
  unsure 43, 89, 194, 226: a, t, c, g, or other
gctgtaatacagatcaattacattgaattttaccatggcagcngaggaagatgtcaagcagaggcagatcattgaaaatcgtgccatanatataagccacaatgttaggtgcactgagtgtggtagccaatcgattgaagattcacaggctgatgttgctattctcctaaggaagctcattcgtgatgaaatanaagcaggaaagagtgataaagagatctacaangaaactagaggatgattatggggagacagtactatatgcccctaaattt

SEQ ID NO: 826 - DNA, 274 bp, Zea mays
  misc_feature: Incyte ID No: 700157646H1
  unsure 92, 96, 115, 122, 166, 175, 193, 200, 211, 239-240, 254, 265: a, t, c, g, or other
tgatggccgaggcccgagacctgtcgtccacctccaccggtggctatggcgatgaagccatgaaagtgaggcatcagcagtggatggcggancatngccgcacctatatggacgnggctganaaggcgcaccggttccaggtattcaatgctaactcgattttgtngacgcgtcnaataatgccgcagtgacnagaaaanctatcggctgnagttcaacgaagttcgccgacatgaccnncgacgagttccatngcccagtacantgcttgatt

SEQ ID NO: 827 - DNA, 96 bp, Zea mays
  misc_feature: Incyte ID No: 700157647H1
  unsure 25, 79, 81, 84-87, 91-92: a, t, c, g, or other
gataaaattggaacgatacagagangattagcaaggatgacacgcacaaatcgagaaatggtccaaattttttaaaaananaannnngaannagat

SEQ ID NO: 828 - DNA, 127 bp, Zea mays
  misc_feature: Incyte ID No: 700157649H1
  unsure 4, 36, 93, 107, 109-110, 112-113, 115-117, 120, 122: a, t, c, g, or other
agantagttgttagcccctccctaataatttggccntcgatgtgatgttgaaagaaccaccgtgggatgacgatcctattaataatgcatgtnatttgtagcgtcanannannannnaananaaaaa

SEQ ID NO: 829 - DNA, 257 bp, Zea mays
  misc_feature: Incyte ID No: 700157650H1
  unsure 59-80: a, t, c, g, or other
gacaaccgctgcgtaaacgaatccatcgccatggcgtctcgtctcgttgcggcggcggnnnnnnnnnnnnnnnnnnnnnnagcgtcccccctcgctcgcctaatctctcgccgcggccttgccggtgccgcagacggccatgggtctgcgaagtgcccttgtggaaagatccgttgagcccgagcaagtggaaggaagagcactttgttctagcaagcctctcaatgtggggggttattttttatggtggttacaag

SEQ ID NO: 830 - DNA, 240 bp, Zea mays
  misc_feature: Incyte ID No: 700157653H1
gtgagctaccatgtccacgatgggcttcttccaggacacccgcgtcgtcggtggtggcagcagccggacggccaggtttctccagtaccagaggctggagtgctgggaggacgccggagtcgctcccagtcccaggtcccggtggcggtggccgtggctgccgacggagaatggtaagatggctcccccctgtttgttcaatgtcaagaggctgaagtggagcaagatcacctcggctct

SEQ ID NO: 831 - DNA, 252 bp, Zea mays
  misc_feature: Incyte ID No: 700157654H1
  unsure 39, 234: a, t, c, g, or other
gactggagttcatgggcatcattgcagtcctcagttganatccaaattgtgggtgatgatttactcgtcacaaacccaaaacgtatagcagatgctattgacaagaaggcttgcaatgctctgttgctaaaggtcaaccagattggtactgtcactgaatcaattgaagctgctctcgattcaaaagctgctggttggggtgtgatggtcagccacagaagtggtgaaaccgangacaacttcatcgcagat

SEQ ID NO: 832 - DNA, 247 bp, Zea mays
  misc_feature: Incyte ID No: 700157656H1
  unsure 215-217, 219, 221, 225, 227, 229-231, 235-236, 239: a, t, c, g, or other
gcagccatgatttaattagaaactcgatgtcaaatgatgttttttttttctagtcttgtgcactggttaattcagttcatgttgttatgtttaactttcctttgctagcatattaataatgcttagtatgttttttgtcatgatatatgtttatacactgttgcccctcgtttatgcaatctttcaaaggagatgctgccgaaattttataaaannnanantcanangnnngaannccnagattgaa

SEQ ID NO: 833 - DNA, 247 bp, Zea mays
  misc_feature: Incyte ID No: 700157658H1
atcggcaaaaagaagactcgagaagaccgggcacgagaggcctcctatctcagtaatgagaatgagaagtacaagaaagctaaagactatgtgaacatgctgaaggactggtacggcaatggagcgtcgaagctgtgcgtgatctacaaccagacgggcggaaccctgcggtacgtcgacgacaaggactggctgggctacccggggccgacgccctacccgacggagatcggcaacgggcagtggg

SEQ ID NO: 834 - DNA, 176 bp, Zea mays
  misc_feature: Incyte ID No: 700157660H1
  unsure 24, 136, 138-140, 143-146, 149-155, 159, 163, 171-173: a, t, c, g, or other
gtctgctgtagtttctaattttcnagatgtgctttcggtttggtctgtagaccctgcagcttgatttggttaagtttgatttgatgcaagggaaatgggtggcggttgattgctaataattcccgttgatattaanannnaannnnaannnnnnnaaanaaanaaaaaaannnaaa

SEQ ID NO: 835 - DNA, 249 bp, Zea mays
  misc_feature: Incyte ID No: 700157661H1
gaattcacagcaatctgtggctcttggcaatacggcaaatccaagggctaggtactgtaggaaatgcaaccagttgaagccacctcggtgccaccattgctctgtttgtggaagatgtgttcttaagatggatcatcattgtgtgtgggtggttaattgtgttggggcactgaactacaaatactttcttctgttcctgttttacaccttcctcgagacaactcttgtcacactctctttattgcctca

SEQ ID NO: 836 - DNA, 252 bp, Zea mays
  misc_feature: Incyte ID No: 700157662H1
acttttgggagaagctgggcggtttcgttctccttcctgccgctggccggccggctggtggcaagctcgatcgagctaggagtcagatggaaggcacgatgaagcacagcaacgttgtgacggagaggagctctgtgaccaagccccgtgaacaggaggtgtccgcttggcatgatgaggctggagagcgtctggtttggacgccgagagcagcagttcagctgatgcttcatgcctagcatcagcacggcg

SEQ ID NO: 837 - DNA, 253 bp, Zea mays
  misc_feature: Incyte ID No: 700157663H1
  unsure 72: a, t, c, g, or other
cttctactccgcattctgaacctgcgacggtacaatgggcgtatcctttttgttccagcaccaggatacgangaagttggtgatcctgtggaccaagctaccggttacgaaacaaacgggtttagcacgggatttcaagacgacggaagaaccggcagtaatggtgagacgtgtggctatgtgggcccatcgatcaaagaagcagaagctggtcttagatggagatcactgaatgggccattcgtttcagtct

SEQ ID NO: 838 - DNA, 255 bp, Zea mays
  misc_feature: Incyte ID No: 700157664H1
accaatcaaaagataacacagtataggaacataggaatagttctttctttttctttttctcttctttttattgactgtaaaagtaccagatcctaacctttacttttcgctttctaataaaatgcgcagtaggggttcccctcctgatccttaaaaaaaaagagttagcgtttgtttgactgctcgtgaattgtgtgttttaacctgctcgtgagtgtgctgtgcagcagcaccaagtcgatgaggagtgacggc

SEQ ID NO: 839 - DNA, 246 bp, Zea mays
  misc_feature: Incyte ID No: 700157667H1
  unsure 57, 143: a, t, c, g, or other
gggaatcgtgctgtaccaggtgggcagtgggcgtctacaagtttattttccaggagnaaagcgaacagctgaatttggtgaagatgagctgaggtgtttccttgagtgggttggtaacaaatggaatcctttgaagggaaganaagatgtcacaagcaagctgacctccactgcagattgtggaagtgaatatttgattgcgaaacaagatccactgaattttcatgtgcctaaaaattcagaacc

SEQ ID NO: 840 - DNA, 243 bp, Zea mays
  misc_feature: Incyte ID No: 700157668H1
  unsure 105, 107, 120, 161, 169, 190, 205, 227, 238: a, t, c, g, or other
gtacagcgacctgctggtgctcagcacgaagatccacttggactcctcgttcgtgttcaccagatcgccgctttgcttgtacagcagccggccttcctccacgangncttcgtacgccgncctctcgttctgctcagcagtcagtaagtcagtcagtcggntacattantacaattatctaggggcaaanggcacaccgcacgtnctggtccgaggtacatgatganctgtgagttgngcttg

SEQ ID NO: 841 - DNA, 241 bp, Zea mays
  misc_feature: Incyte ID No: 700157669H1
  unsure 203, 214, 219, 226, 229: a, t, c, g, or other
ctgggatactgccgggcaggagaggtatcatagcttggctcccatgtactataggggtgcagctgctgccattgttgtctatgacatcacaaatccggcctccttcacccgtgccaagaaatgggttcaagaacttcaagctcaaggaaatcagaataccatagtggctcttgctggaaacaaggctgatatgctagatgcgnggcaggtgccngcagnggaagcnaangcgtatgctcag

SEQ ID NO: 842 - DNA, 241 bp, Zea mays
  misc_feature: Incyte ID No: 700157670H1
gttgaagctaaacatggcaggtccctgaaaccctccctgaggaagtgcttggaaagatgggcgcaccccctaagcctgacgtgccagtcatcacgccgcaagaactcgcagaggccgacggaatcctcttcgggttcccaacgaggttcggaatgatggcagcgcagatgaaggcgttcttcgatgccactggtgggctctggagggagcagagccttgccggcaagcctgccggcgtctt

SEQ ID NO: 843 - DNA, 240 bp, Zea mays
  misc_feature: Incyte ID No: 700157675H1
  unsure 51, 128, 140, 157, 184, 189-190, 194, 196-197, 203, 206, 208, 210-211,215, 223-224, 226, 231, 233-235, 238: a, t, c, g, or other
cacgcggagctcaagtcgctcaccgcggcgttccacgccaagggcgtccantgcgtcgccgacgtcgtgatcaaccaccgctgcgccgactacaaggacggccgcggcatctactgcgtcttcgaggntggtacgtcgancgagccgtctcgactgnggccccgacatgatcttcagtgacgtnacgcnngacncnnacgggngtngncnncggncaactgtnncntactncnnngcngc

SEQ ID NO: 844 - DNA, 239 bp, Zea mays
  misc_feature: Incyte ID No: 700157676H1
  unsure 110, 196-197, 200-201, 203-206, 210-211, 213, 215-216, 220, 224,226-229, 231-232, 236: a, t, c, g, or other
atacgtacctatatagttgatccaggagacacgtacgtgagacacaaataaactaaactagcacacaaatgatgaaatgaataagttattatgaataacttgtgcaagancacattacattattgttcttctagcttcaaggttgggaattgaattctgtgaaataatgatatgagatacgttgtgtaccaaaaannaannannnnaaanngnannaaanaaangnnnnannaggnggg

SEQ ID NO: 845 - DNA, 113 bp, Zea mays
  misc_feature: Incyte ID No: 700157677H1
  unsure 56, 61, 72, 75, 91: a, t, c, g, or other
cccaattcttgaggtttttaagcaatgagcttgagagttacctgtaaattctagtnttgcnagggagcaaangcntccaagtaagaaaccnatttgctggaagagaacttcat

SEQ ID NO: 846 - DNA, 101 bp, Zea mays
  misc_feature: Incyte ID No: 700157679H1
  unsure 13, 36, 42, 60, 64, 66, 70, 72, 76, 84, 98-99: a, t, c, g, or other
ggagaacttcaangagggcgggcagcgcaaactggnttccangttctaagccaattagcnccantngccnantganctggttgngaaattggccctannac

SEQ ID NO: 847 - DNA, 242 bp, Zea mays
  misc_feature: Incyte ID No: 700157680H1
  unsure 91, 100, 102, 109, 116-117, 123, 127, 136, 148, 174, 178, 182, 202, 205,211, 225, 240: a, t, c, g, or other
ctcgcgcacccggccgtgggcggcttcttcacccactgcggctggaactccaccgtggaggccgtgtcgaagggcgtgcccatgatctgcnacccgcgcnanggggacnagtacgnnaacgcnaggnacgtgtgcnacgtctgaaagntgggcacggaggtcgccggggaccanctgnaganaggggagatcaaggccgccntcnaaaggntcatgggcggcacnaggaaggggagggcntc

SEQ ID NO: 848 - DNA, 242 bp, Zea mays
  misc_feature: Incyte ID No: 700157681H1
  unsure 3, 54, 103, 105, 127, 129-130, 145, 235: a, t, c, g, or other
acnaaactccactgtctccaactctccatcgcggctgctacgcctctcctgcangacgaccaatggcttccaggaagttcttcgtgggtggcaactggaaatncnacggtactggcgaggacgtgangnngatcgtcaccgtgcncaaccaagccgaggtgccctctgaagacgtcgtcgaggtggtggtgagtccgcctttcgtttttctgcagcaggtcaaggggctgctgcngctggat

SEQ ID NO: 849 - DNA, 105 bp, Zea mays
  misc_feature: Incyte ID No: 700157682H1
  unsure 76: a, t, c, g, or other
caattagaaacacaggtaacacacttaactttatggatgaggatagggttcggttttgtagtgcattctgattgtngaagggagattcagcatcggaacatagct

SEQ ID NO: 850 - DNA, 236 bp, Zea mays
  misc_feature: Incyte ID No: 700157684H1
acctctcctttctcacacctcgacgcctctctctctttccccgagctctcgaaaccctaggtgcgtgccgaccggcggcggcggcgaggtgatggcgatggacccggacgcggtggcgaaagccttcgtggagcactactaccggacgttcgacaccaaccgcgcggcgctggtggggctgtatcaggagacctccatgctcaccttcgagggccagaagttccagggcccatccg

SEQ ID NO: 851 - DNA, 236 bp, Zea mays
  misc_feature: Incyte ID No: 700157685H1
  unsure 25: a, t, c, g, or other
gaagcagcagaaggataagcaaganaagtcagagacggaggatgcggcacccaaaaacatggcagcctctagcaaccaggatcagaggcaaaccttgaagttcggattctctaaaatggctccttccaaggttctagttggtagtgccagcaagaagccaaaggttgccacgaaagtttcttctgtctttggcaacgagagtgatgaggactcgtgacctttgccagagggtggca

SEQ ID NO: 852 - DNA, 107 bp, Zea mays
  misc_feature: Incyte ID No: 700157686H1
gaaacgcatgtttggccagccagttctgttatgcttttgaatgaaaaatttagacccttctttctcgtttccttaatcgaaatgcttgcactctatgttccatttgt

SEQ ID NO: 853 - DNA, 233 bp, Zea mays
  misc_feature: Incyte ID No: 700157687H1
  unsure 6: a, t, c, g, or other
caagcnactaaagtcatttgtagaaaaacagtgcaatgagatgcaggacttgctggcacggaatgcaatgttagcagaagagttactgagaactggtggtggtacgaccacagatacttcacagaaaccgagcagtggccgagaaagggtccagattgaagctctcagacaagaactggagggggcaaaacgacagataggggcactcaaaagtgagaagtcccagattgaag

SEQ ID NO: 854 - DNA, 231 bp, Zea mays
  misc_feature: Incyte ID No: 700157691H1
aaagccttcttcatgctctgaaattcaatgatttctaccatgacactgttcaccagtttgctcctacatacaatgaatatgtgctctacaatcacaatgagggagacaatgcagaaacgaaatttccctcagggagcactgccacaagtgggcagggtgtggagttggctggcattaccgttgtggcttcaaacagtccagtgacaccaagtgtatcatgcaaccaggcag

SEQ ID NO: 855 - DNA, 170 bp, Zea mays
  misc_feature: Incyte ID No: 700157693H1
  unsure 18, 51, 94, 101, 123, 143: a, t, c, g, or other
gaaagattgactagtgtncccagcatccgatatcaaatttacaacattgcncacacagacaccacctaggctaaagggagagcaaacatctagngtaatangagaaccaaaccctacatttcnccgacgcctacccctcctcnacttcttcgccttccgagacggcgctt

SEQ ID NO: 856 - DNA, 86 bp, Zea mays
  misc_feature: Incyte ID No: 700157694H1
  unsure 33, 74: a, t, c, g, or other
acatagaaaagtggattagggtgaacgtttgtntaaattctaactatatccacttctcacacatatggattgcnaaacatgccctt

SEQ ID NO: 857 - DNA, 238 bp, Zea mays
  misc_feature: Incyte ID No: 700157695H1
  unsure 126, 147, 229: a, t, c, g, or other
ctacaaaggacagggaacagaagtcggccgggtcctactactacctcgatgactaatgaggaagcacagattcttcttggagagccatatggcgcatagtctttcgagggcgcggagagtgcgganacgagaagctactatgaagcnaccacactacatggcatgagacttggttgcaggagtagagtgcgccggttataacttataaagcagagcatgctgtgttganactggtttt

SEQ ID NO: 858 - DNA, 270 bp, Zea mays
  misc_feature: Incyte ID No: 700157701H1
  unsure 26: a, t, c, g, or other
atgatgtagaaattgatgcaattctngaggaagaggaggccctcattgcagttcacaggaaggagatcgagaatactatggagattgtgcgggaagagatgaaccttttggcagaggttgatcaaccaggcagcctgattgacaactacgtgacacaactgagctttctgctgtcacgcaaggctgcaggtttggtcagcctccaatcacacttggcacggtttcagcaccgcctcaaagagcaagagatccttagccgcaagaaacctt

SEQ ID NO: 859 - DNA, 262 bp, Zea mays
  misc_feature: Incyte ID No: 700157702H1
gtctggtggggtttggcatcctattctcattccttggtgttatccttttcttcgataggggcttgttagctctgggtaatattttctttttaactggagtgggtctgttactcggttggcaatctatgtggcagcttttcacaaagaaggcaaaccttaagggatcagtgcctttcttcattggtttgtttcttctgtttgtccgttggcctgttgctggtataatcatggaactatatggatcttttgtgctcttcagtgg

SEQ ID NO: 860 - DNA, 138 bp, Zea mays
  misc_feature: Incyte ID No: 700157704H1
  unsure 135: a, t, c, g, or other
gttttcatgtctgatctcgacattcagatcccaactgccttcgattccttcgctgaggccaatgctggggactctggtgcggcacagggtcaaaggactacgttcacgtgcgcatccagcagcgtaatggtcgcnaga

SEQ ID NO: 861 - DNA, 263 bp, Zea mays
  misc_feature: Incyte ID No: 700157705H1
tgatcactgggatgcagcttagccctgatgggtcttacctcctgaccaatgcaatggacaatgagctcaagatctgggatctgcgcccttacgcaccagagaaccggaacatcaagactcttacaggtcaccagcataactttgagaagaacctactgaagtgtagctggtcgccagataaccgcaagtcactgctgggagcgcagaccgcatggtctacatctgggacacaacatcaaggcgcatcctgtacaagcttcccg

SEQ ID NO: 862 - DNA, 264 bp, Zea mays
  misc_feature: Incyte ID No: 700157706H1
gagaagctgaaatggctcctaaagctgctcctgccaagaagggtgatgccaagacccaggccttgaaggttgccaaggctgtgaagtctggggcagccaagaagaagaccaagaagatccgcacgtctgtgacatttcaccgccccacgaccctgaagaaggctagggaccccaagtacccacgaatcagcactaccggaaggaacaagcttgatcagtaccaaattctcaagtacccccttaccacagaatcagcgatgaaga

SEQ ID NO: 863 - DNA, 259 bp, Zea mays
  misc_feature: Incyte ID No: 700157709H1
  unsure 213, 229, 231, 235-236, 253: a, t, c, g, or other
atcatatacagagactacgtagacgtcagtgttgctgttggcacttccaaggtgccatattgcttactccctgacccaaaaagaatgcaaccatgggttggttgcgtgcccgttaaactagttcacatttgatcaagtttctagtgtagtattcacgttcaaggctccaaatcaatttattatgaaaataaatttcgtagctaactaaattgnattaattgatgttttnanctanngtgggtgcccctgaagntgtaaa

SEQ ID NO: 864 - DNA, 261 bp, Zea mays
  misc_feature: Incyte ID No: 700157711H1
ggacgtgattattggttgctatgaagagtttaaggtctggtacacttttttcatcttttgacctgaagtcaccttcccttgtgtggtatccaaaatcacttgtagactgtatttgccagagcaagaaaataagccgaggtgaactagtgaagaagctgaggcatgtagttggtgatagagtgctaatatcgacgataatgcgtctccaagataaggtgtgaattgttctgcttgaaccttgctgatacagttatcttggat

SEQ ID NO: 865 - DNA, 263 bp, Zea mays
  misc_feature: Incyte ID No: 700157712H1
ccttgaacaactaagcaagtccaatgtctcatgcccagccccttcgtttacaggcccagtggaaacacgtcgatattcaggataaccaagccaatgctatgaaggaaccaggaaccagtggtgggtatggctccccaatgaaagatgacaagaacaaggatgtggatacaatagcttcgaacttcatcaagcttaagcacagggcttgggcactccagaagagcacaaccatgtaccaaccttccacttaaaggtgttgctag

SEQ ID NO: 866 - DNA, 261 bp, Zea mays
  misc_feature: Incyte ID No: 700157716H1
  unsure 188: a, t, c, g, or other
cctaaatctgatctaccttcattggtggataaatatgcagcaaaggaaatccaagttgatggcctagtcacgcatgatataccattcaatgaaatcaacaaagcgcttgagttgatgctagaaaacaagtgcttgagatgtgtgattcacatgccacggtaacagggtcgaacagctgcacataatantatgatatctaccatatgttgcatatctgctctttctaccttgatcatcttgtggctcaccgtccagtactca

SEQ ID NO: 867 - DNA, 135 bp, Zea mays
  misc_feature: Incyte ID No: 700157720H1
aatgtatggatgtggaatgccgaccataatgccattctgaatacctttgctggacatagtaacacagtgacatgtggtgattttactccagatggtaaacttatatgcactggatcggatgatgcgtctttgagg

SEQ ID NO: 868 - DNA, 259 bp, Zea mays
  misc_feature: Incyte ID No: 700157721H1
atcaaatacatctatttctggacatgagaatacaacccacccatcaataacagcttttcagagtgcaaccttgaagatcacgtttgatttcaaaatgaagcttggaaacccacgagagactacaattcatgccacttttaccaatttgacatctagtacttttacagattttatttttcaggctgctgttccaaagttcatccaattgagactggatccggctagtggcaacactgttccagctaatggaagtggttca

SEQ ID NO: 869 - DNA, 135 bp, Zea mays
  misc_feature: Incyte ID No: 700157725H1
atgatacaagcatttcggagttgtattaaagtttgtatatacacatgcattcagctcgcgcattctgtatgcttatttgaattcagacatcacggcactcccacaaaccattcagttgtaacaaggtgaacatac

SEQ ID NO: 870 - DNA, 86 bp, Zea mays
  misc_feature: Incyte ID No: 700157726H1
aattgtggcaacaggagattttgctttacgtaggcaatatattgagaagctactcttactcatccaccatgaataatctttgctgc

SEQ ID NO: 871 - DNA, 257 bp, Zea mays
  misc_feature: Incyte ID No: 700157727H1
  unsure 221: a, t, c, g, or other
ctcttagctagccctagccacgtccccacacatcgtagacaacgcaattagctaggaatagcatccatggcgtccggggctgctgcttcctcggccctcttgctcctcgtcgcggccttggtggccaccagtgcgagggcggccacattcaccatcaccaacaactgcggctcgacggtgtggccggcggcaccccggtgggcggcggcacgcagcttgancccgggcagacgtggaccgtggacgtgccggcgggg

SEQ ID NO: 872 - DNA, 259 bp, Zea mays
  misc_feature: Incyte ID No: 700157728H1
aatacatttataagctggataagattacttacaacaagttgcatccatatacatcctggatccccataactgtctacatatgcctacgcaacttcactcaagaattcaggggcttctccctcacactatttgcctggcttggaaagattacactagaaacatacatatctcagttccatatctggctcagatcaagtgtgcccaatggccaaccaaaatggctattgtcaataatcccaaattatccactgctcaattt

SEQ ID NO: 873 - DNA, 258 bp, Zea mays
  misc_feature: Incyte ID No: 700157730H1
acgggcgactgcggcacggacctggaccacggcgtgccggcggtcggctacggcgtcagcgacgatcgcacgccctactggatcgtcaagaactcgtggggcccttcctggggagagggcggctacatccggatgcagcgcggcaccggcaacggcggcctctgcggcatcgccatggaggcgtcctttcccatcaagacctcgcccaacccgtcgcgcaaccccgccgcgcgctcatcaccagggacgcctcttccc

SEQ ID NO: 874 - DNA, 136 bp, Zea mays
  misc_feature: Incyte ID No: 700157732H1
gagaaatatgaatgcaagggatgcgtgcaagaatcaaaaggttgtctgcctaccacgtgtttcaagggttgttgatatcatttctgttttgcgaactaacaagcataatggtttccctgttgttgaccgtgggcaa

SEQ ID NO: 875 - DNA, 255 bp, Zea mays
  misc_feature: Incyte ID No: 700157733H1
  unsure 13, 24-26, 30, 40, 51, 60, 69, 104, 110, 112, 131, 157, 188, 192,198-199, 211, 222-223, 235, 241, 248-249, 251, 254: a, t, c, g, or other
cagacactctacntatatcctctnnncgtntatctcgtcntacagagccgnaagctggancttccaatngcgggagacaacgacctgaaggtgctcggcgtgtngacgancncgttcgtgatccgggtccncatcgtgctcaacctgaagggccttncgtacgagtacgtggaggaggacctcagcancaanagcgcnntcctcctggggnccaacccggtnnacaatattgtgntggtgntctctanncnggnt

SEQ ID NO: 876 - DNA, 131 bp, Zea mays
  misc_feature: Incyte ID No: 700157734H1
tgtgctttcacgtcatttgttgctgattgcactgtgttcttttcaccatccttctttcttccagcattcaaaccctagcgcgccgccaccatctcccgtttgatcacgccacaaaccgagtcaaagccgct

SEQ ID NO: 877 - DNA, 131 bp, Zea mays
  misc_feature: Incyte ID No: 700157735H1
ctggaaggtttagcactctatgctgaccctgattttaaggtgcttgctgcatcatatccttactttgcgaaaaggctactgactgatcccaacccatatctcagagatgctttaattgagcttgtattcaa

SEQ ID NO: 878 - DNA, 255 bp, Zea mays
  misc_feature: Incyte ID No: 700157737H1
  unsure 69-90: a, t, c, g, or other
caaagctagagacaaccgctgcgtaaacgaatccatcgccatggcgtctcgtctcgttgcggcggcggnnnnnnnnnnnnnnnnnnnnnnagcgtcccccctcgctcgcctaatctctcgccgcggccttgccggtgccgcagacggccatgggtctgcgaaggtgcccttgtggaaagatccgttgagcccgagcaagtggaaggaagagcactttgttctagcaagcctctcaatgtggggggttatttttta

SEQ ID NO: 879 - DNA, 249 bp, Zea mays
  misc_feature: Incyte ID No: 700157738H1
  unsure 219, 241: a, t, c, g, or other
gtcggctcttgctgatcttgttggctttctgcctctcactaagatcaaggtccttgcgagcagtgcggtgttctacaccccgttcttgagacagatttggacatggcttggcttggtacctgcgacaaggaagaatttctactgctaccttggagctggttatagttgtatcgtagtccctggtggtgtacgggaaatgcttcatatgaacaatgatcnagaggtgctttccttaatcaanaaaggttt

SEQ ID NO: 880 - DNA, 251 bp, Zea mays
  misc_feature: Incyte ID No: 700157739H1
  unsure 181: a, t, c, g, or other
ccttggactcacaggttgtgacagttggaaagtttcaaggaggtggagccttcaatgtgatccctgattcggtaactataggtggcaccttccgagcctttctgaaagagagttttaatcaattgaagcagcggattgaagaggtgattgtgtctcaagctagcgtgcaggctgcagcgtncgtggacttcctcagcaaggaccgtcctttcttcccgccgaccatcaacagccccgagctccacgacttt

SEQ ID NO: 881 - DNA, 177 bp, Zea mays
  misc_feature: Incyte ID No: 700157740H1
actcgatgaaggggatgccagtggcaagtcaaagcaaagcaggagtgagaagaagagccgcaagccatgctgaagcttggcatgaagcccatcactggtgtcagccgcgtcactgtaaagaaaagcaagaatatactctttgtcatctccaaaccagatgtgttcaagagtccgaat

SEQ ID NO: 882 - DNA, 251 bp, Zea mays
  misc_feature: Incyte ID No: 700157741H1
  unsure 235: a, t, c, g, or other
ccttattccattatgaagcacctgaagtgcatgaatctggatcagtaagcgatcgaagtgatgtttacagcttcggtgtagttatgttggagcttctaacaggacgtaaaccttatgacagttcgtatccacgagctgaacaacatctagtacgatgggccacttctcaactctatgatattgatgccataacgaagatggttgatccttccattcgaggacaatgttctgatanggcattatcccgtttg

SEQ ID NO: 883 - DNA, 130 bp, Zea mays
  misc_feature: Incyte ID No: 700157742H1
  unsure 9, 34, 58, 80, 97, 107, 113, 116, 124: a, t, c, g, or other
ctgatgganaacgccttctagttcatcaagtccntcggcggcatcaccaccgaggccncgtacccggaccgcgcgtccancggcacctgcgactgcnatcgggcccngcgcgnggnaggcgtcntcgtgg

SEQ ID NO: 884 - DNA, 254 bp, Zea mays
  misc_feature: Incyte ID No: 700157746H1
gtacgctctccaatgatattgtatcaaccaagcgtgaacaaagagagaagcattgtgtctccactgttcagtgttacatgaagcagcatgaaataacaatggatgaagcatgtgagcagataaaagaacttacagaagattcatggaagttcatgattgaacaaggccttgcactaaaagaatacccgataattgtgccacgaacggtactagagtttgcacgaactgtagactacatgtacaaggaagctgat

SEQ ID NO: 885 - DNA, 254 bp, Zea mays
  misc_feature: Incyte ID No: 700157747H1
  unsure 249: a, t, c, g, or other
tgtctttctttaactttattaagaactcctaaaaaactcgacccttgtattaataactccatcttagctgtgtgtcttgaactaaatggattttcttcccaagtggaaacaaaaagggatcttatggatggaccttaaagaagtatgtgtttctatcttaagataacagatgatgcatggatgatccttaaatatgtgctaatgcaatatcagatgatacaaggaagaaccttgaaagtagtatgtgtntctat

SEQ ID NO: 886 - DNA, 254 bp, Zea mays
  misc_feature: Incyte ID No: 700157748H1
  unsure 214, 247: a, t, c, g, or other
gtacgaacggtcggtcgaggcactgtctgttctctcccagtccgtcgacgcgaaagggcggcagtccaagtggtgaagatccacgtccccgggcctctgtacatgacagaggaagaggcacaggcgttgtttcatcgggacattctgtgccgaggccagcgggcacgagattggccgcctcgtacgtcaacttctacatcgccaatgggggatnatagcgccttccttcggcgacaggtgggacgangaggcgt

SEQ ID NO: 887 - DNA, 278 bp, Zea mays
  misc_feature: Incyte ID No: 700157749H1
  unsure 228, 235, 268: a, t, c, g, or other
gccgcacttcgaacgtgctctatcgaagatcaagccatcagtatctgaacagcaaatcaagaattatgaggcgttgtcaatgagatactcgtcaaactgatccatcaccagctgtccacatgttagtgtgtatacgaggacaaccttgtgaaaaaaatgtggtgtcttttacccatttctgaagcacattataatttcatgtgagagcctgtggtagagtagtttagntacaaanagaaatctgcatgttatcgcgatcacttttgtntccattttca

SEQ ID NO: 888 - DNA, 270 bp, Zea mays
  misc_feature: Incyte ID No: 700157751H1
  unsure 39, 225, 229, 233, 243-244, 248, 252, 258, 264, 266-268: a, t, c, g, or other
gtcgtggtgaagtcttggattctgcagtgcattcttctntgttagctgttgatcctgtgaagtatgttaacaaaatgtccaacggtcaaatgctgctatgaagtgcaacctcagatttgtcaatcgaggtcttgctgctatagctgaaaagagagcttgctgagttgattcacagaaatagtgaagtaacataacccggcatgtaggtagctctcgacctcttgngggnaagnttggattcgnncccnaggntttatngctggntnnngg

SEQ ID NO: 889 - DNA, 131 bp, Zea mays
  misc_feature: Incyte ID No: 700157753H1
  unsure 2, 106-108, 111-114, 117-120, 125, 128: a, t, c, g, or other
gnttttttgaatctactttcatatgtttctgtccatcagaccgtgtttagaaactttgaaagacagttctacagtgtttatgcaatgtcttatatcgaagtaaaannnaannnngannnntaatngtngtg

SEQ ID NO: 890 - DNA, 266 bp, Zea mays
  misc_feature: Incyte ID No: 700157755H1
  unsure 173, 186, 188, 191, 199, 205-207, 209, 212, 217, 231, 236, 245, 247,250, 261, 265: a, t, c, g, or other
cattggtgaacttgcacttgatccaactttatttggatcatcaacaacacttctaaacgctgatcatcaggaggtttacttcaacggaatgccagaatggcacgggaaaatcctccgcaggcatggagatgaatttgagcgtacttctgacgggtattatagagctcagggcntgtagatggaganantgnccctgtgnggattnnngnggngttcntttttttgtgttgntgtgngttgtgttntnggncggccatccgnagant

SEQ ID NO: 891 - DNA, 272 bp, Zea mays
  misc_feature: Incyte ID No: 700157756H1
  unsure 2, 56, 102, 129, 166, 180, 195, 202, 231, 235, 241, 246, 255, 258, 260,265, 267: a, t, c, g, or other
anagcattaaggttactatggatgactttgtgaatgcacttcatgaaattactccngcatttggtgcttccaccgatgatctcgaaagatgcagattgcganggattgttgactgtggtaaggcacatnagcacatttaccagagagctatgcgccttgtagagcnagttaaagttagcnaaggtagtccacttngtgactngcctgtttggaaaggtcctgctgggaaanggtnaaaccnagttngggccagcnaangntggcntncccag

SEQ ID NO: 892 - DNA, 265 bp, Zea mays
  misc_feature: Incyte ID No: 700157757H1
  unsure 237: a, t, c, g, or other
gattaaatacagcactcctgtttttcttttccattccacaggaacttcagaagcatggtagtcctggtattgtaatggttttggttggtaataaggctgatctacatgataatcgaagtgtatcctcgcaggatgcgcaggactacgcagagaagaacaatatgtttttcattgagacgtcggccaagacagctgataatataaaccaactgtttgaggaaattgcaaagaggtgcntatgccaacggcatcgtgacagatcatt

SEQ ID NO: 893 - DNA, 266 bp, Zea mays
  misc_feature: Incyte ID No: 700157758H1
caaaggcatggccgcggacagccgcttcctcatgccaattgtgctgagggagtgcggcgagacgtttcgtgggatcgactcgttggttgacgtcggtggtggccatggtggcgccgccgccaccatcgccgccgccttcccccacctcaagtgcagcgtgcttgacctcccgcacgttgtcgccggtgctccgtctgatggcaacgtgcagttcgtcgcaggcaatatgtttgagagtattccacctgcaaccgctgttttcctca

SEQ ID NO: 894 - DNA, 266 bp, Zea mays
  misc_feature: Incyte ID No: 700157761H1
  unsure 33, 179, 208, 235, 256, 265: a, t, c, g, or other
aaggattgaagattacaggaagaactgtttggngaaatccacagggttaccttcctggtaaaatggctccaatgatgacattttatggtttcatgtcacttgcatatcttgtacttggacttctatggttcattcagtttgtgcgatgctggaaggacattttgcagctgcattaccanataacagctgttattgctcttggcatgtntgaaatggcttttggtaatttgagtangctaactttaattccactggnaccagaccnt

SEQ ID NO: 895 - DNA, 267 bp, Zea mays
  misc_feature: Incyte ID No: 700157762H1
  unsure 109, 113, 198, 206, 218, 222, 227, 248-250: a, t, c, g, or other
aattgatgaagtggacagtacagttcatgtttcgtgggtccagcccagagtgcttggaatcccacaggttaaggctttgcgcgaccgcctggatgcctgggttggaaangtgnatactacattgctttcagttgaggcagaaacacctgatcttgttgctgcctaattgagcacctgttacacttccgcgagaggctnggtcatcnaggtgatgagangcantgtgncacttgtagtcattttctggnnntgaacctgctgccctga

SEQ ID NO: 896 - DNA, 269 bp, Zea mays
  misc_feature: Incyte ID No: 700157763H1
  unsure 186, 194: a, t, c, g, or other
aaaagcttgccaaggagtgggaaatgaaggtgaaaacattcaagaaaaggcttgatgaaattcagataaatgttgttaaacacatggatcaaatccaaaaggatgctgttgatcctgagaaactcaaagcgactctaggtgatgagcaactaaatgacacatatgacatgaaaagggcaatggagntggtagcnttgttagaggcccagattaaagatttgaacccaaatctggattccatagcagagtaccgcacaaaggcttgcttg

SEQ ID NO: 897 - DNA, 251 bp, Zea mays
  misc_feature: Incyte ID No: 700157765H1
  unsure 34, 54, 58, 82, 110, 124, 128-129, 143, 152, 155, 164, 171, 173-175,186-188, 195, 199, 206, 214-215, 226, 228-229, 231-232, 247: a, t, c, g, or other
ctcttgcgagcgacgacgccgggcaccgtgaagnagtgaaaggcgtgctgcgcntgtnccccatctgggcgacgtgcatcanctacgccgtcatcttctcgcagtcgtcnacgttcttcacgangcannccgcgacgctgganctgcggggntgntcgactctncgcttgncnnngggggtgctgnnngacgttnatcnggggttntatcatgnnctcatcccggntnngnngtgtgtgtgtgctcnattc

SEQ ID NO: 898 - DNA, 263 bp, Zea mays
  misc_feature: Incyte ID No: 700157768H1
  unsure 143, 147, 165, 180, 210, 226: a, t, c, g, or other
atcctatcttgtccgctgcccccgccgccccgcggttgggtcgtgtcgtgtccccacctcgtcttcgttctgctcctaccaattccagtcccagccatccgcccgcccaactatggcggcaacggctctgctactccccagcntcgnggcgctcacggacacgcngcgccgcgcccacangttgctgcagccgcagtccagctccagcgnggctcccttgtctctnggtccctccggcctccgcggcgtcggcggctcgcggt

SEQ ID NO: 899 - DNA, 259 bp, Zea mays
  misc_feature: Incyte ID No: 700157771H1
  unsure 204, 206, 220-221, 226-227, 246: a, t, c, g, or other
aattggagcagccttcttttcccagaccttagcggtcaatgatgagactgttaagttcgaaatctgggatactgccgggcaggagaggtatcatagcttggctcccatgtactataggggtgcagctgctgccattgttgtctatgacatcacaaatccggccttccttcacccgtgccaagaaatgggttcaagaacttcaantncaaggaaatccagnntaccnnagtggccttgctggaaacnaggctgatttgcc

SEQ ID NO: 900 - DNA, 258 bp, Zea mays
  misc_feature: Incyte ID No: 700157772H1
  unsure 10, 134, 210, 215, 217, 224, 227: a, t, c, g, or other
atccagaggnacccctggtgattggagccatatcattaagcaaattgggatgtttactttcactgggctgaatagcgaacaagtcgcattcatgaggcaggaataccacatttatatgacatctgatgggaggntcagcatggccggtttgagcatgaggactgtgccccatcttgcagatgccatacacgctgcagttactcaactganatgangntagtatngcngctttcgtgataaaacctgattcacccacaa

SEQ ID NO: 901 - DNA, 123 bp, Zea mays
  misc_feature: Incyte ID No: 700157773H1
tccagatcgaccccgccaagtacaagaacacctcgtcggcgttcagcgtggtgatgagggagcagggcctccggggcttctacagggggtgggcgccgacgttcgtgggctacagcgctcagg

SEQ ID NO: 902 - DNA, 260 bp, Zea mays
  misc_feature: Incyte ID No: 700157776H1
atcttcaatgaatcctatgaatcatcaacatactgttctgaatcatttgccatctggagcaccactaccaggccatatttctcagatgctaccagccaggtctgatatgcacacacttaattgctggaggccctcttgatagagttgtaaactgaacttcttgtttgtgattttgacatggaaagctcagggcattggaggcaatttgaattgagttcaacaattggtggctgttagtctgagatggagatgcacttgcc

SEQ ID NO: 903 - DNA, 234 bp, Zea mays
  misc_feature: Incyte ID No: 700157777H1
  unsure 22, 89, 232: a, t, c, g, or other
cagtaccagcagacagcagggnggaacacgatgagcggcgccggtccggatctgcagctgccaccggggttccggttccacccgacggncgaggagctggtgatgcactacctctgccgccgctgcgccggcctgcccatcgccgtccccatcatcgccgagatcgacctctacaagttcgacccatggcagctcccaaggatggcgctgtacggcgagaaggattggtacntc

SEQ ID NO: 904 - DNA, 260 bp, Zea mays
  misc_feature: Incyte ID No: 700157778H1
  unsure 67-68, 99, 167, 184, 243: a, t, c, g, or other
gtggtctaccagactgagaagcaactgaaggagcttggcgataaagtccccgctcccgtgaaagagnnggtggatgtgaagctccaggagctcaaagangcaatatctggtggatcaacacagagtatgaaggatgccatgtctgctttgaaccaggaggtgatgcngattggccaggcaatgnataaccagtctggtgctagtgctgctgggcctactcctggtgctgaagctgggcctaancctggtacggaccagcg

SEQ ID NO: 905 - DNA, 124 bp, Zea mays
  misc_feature: Incyte ID No: 700157779H1
  unsure 111, 115: a, t, c, g, or other
gccgcctcaccgcctctctcaatctgataccgcagatccgtcgtccggtgagtggaagccgcacgaacccatggcctccggcgagcttgcctgcacctacgccgctctcancctnagcgacgat

SEQ ID NO: 906 - DNA, 260 bp, Zea mays
  misc_feature: Incyte ID No: 700157781H1
  unsure 154, 179, 190, 194, 197, 217, 229, 256: a, t, c, g, or other
cgttgccgccgccgccggtgaaaactacatcgggtgctagctccgacggtggtgcgtgccctgttgacgatagggcacgcggggcgcgggcagcttgtaagcgttcgatcggccatgtagggcaactatacatctttggcaggtctccaactcnccatcatcctccgtgggagagaagntggtaatggantgcntgngtatgtatgtgtatgcccanggcgcgcgcgcnggctctgggcgagtcacagtagagatncaat

SEQ ID NO: 907 - DNA, 120 bp, Zea mays
  misc_feature: Incyte ID No: 700157783H1
  unsure 36, 93, 95, 97, 99, 103, 105-107, 109, 112, 119: a, t, c, g, or other
acttgttgcaacttttgagtgtggaaatggattggnatagtcgccatgaatttgctggctactttatacatgtctttgttcataaaaaaaaananananaaanannnanaanaaaaagng

SEQ ID NO: 908 - DNA, 152 bp, Zea mays
  misc_feature: Incyte ID No: 700157784H1
  unsure 12, 23, 43, 55, 76, 82-83, 91, 100, 110, 121, 129, 137, 140-142, 147: a, t, c, g, or other
ctcagttataantagctagggcntctggctgctggaaaatcangcacgcatccancacacacacagctagcgagcngatcgnngcgagtgnagatccaangaggtagagngatggaaaggntgagttcntcgctgcngtnnngttgntggag

SEQ ID NO: 909 - DNA, 120 bp, Zea mays
  misc_feature: Incyte ID No: 700157786H1
  unsure 16, 69: a, t, c, g, or other
gcagacagacgggaanggagggcaaccgagagcgatcggcgatgggctccttcctctcgagcttagtcnccgccccctccggccgccgacgaccccaactgcgccgtggtggccgcccac

SEQ ID NO: 910 - DNA, 119 bp, Zea mays
  misc_feature: Incyte ID No: 700157788H1
  unsure 47-48, 86, 111: a, t, c, g, or other
cacaaagcatctcgcgtgtgggatgctccggcgtgtggaaagtagannagccaaataaatgggtacatgtacagcaggcgtgagtncttaaatactcagattccttgtccntaggcaaa

SEQ ID NO: 911 - DNA, 250 bp, Zea mays
  misc_feature: Incyte ID No: 700157789H1
caaggggccaatcactaagattgatcctataggaaactctcctgtcattattgagaaggaatctcttggaaggattgcaccgacttggatgaatgtttcattagcaatgaaaaaagatcctgacgcagataaatcttttggctgggttcttgaaatgtatgcctatgccgtggcatctgctctccatggagtgggcaacatcttacgcaaggactttatgattcagcccactttggacttggaagtggtg

SEQ ID NO: 912 - DNA, 118 bp, Zea mays
  misc_feature: Incyte ID No: 700157790H1
ctctgagcattctaaagctcatagtcctctcctcccagagcatttcacatcggtctcatctccacctgcttgtatccagcgcctcgtcactctacaaaacaacaacacatacttccaa

SEQ ID NO: 913 - DNA, 178 bp, Zea mays
  misc_feature: Incyte ID No: 700157791H1
  unsure 26, 35: a, t, c, g, or other
gctatttgtaatttgtgttgggaganacacaaggncggtacggtggtgttcaacttattgcatgtgtatggtgatctaataagtaaagtataataaaaagggatatgttggatgtgtacccatcgcctgctccttacatcatttttgacatatatatactcccttcgttccagtaaaa

SEQ ID NO: 914 - DNA, 118 bp, Zea mays
  misc_feature: Incyte ID No: 700157792H1
  unsure 69, 94: a, t, c, g, or other
aggcataagacgacgtctctacctagctagctatagctgctgaatacatacatatacttgtcgatcganacgtcgcttgtgacgtccgtccagngcattatgaatcatcttcgatcga

SEQ ID NO: 915 - DNA, 253 bp, Zea mays
  misc_feature: Incyte ID No: 700157794H1
  unsure 188, 213, 227: a, t, c, g, or other
aacggattcgactggctcgccttctccgacctctccggcttcgcgcgcctgtcgcttggctccgccgtcatgctctgcctggagttctggttctacatgttcctgatcgtcatcgtcggcaacctggagaacgctcaggtcgccgttgctgcagtctccatttgcacgaacctgttcgggtggccagntcatggtgttcttcggattcaacgnggccatcagcgtgngggtgtggaacgaactgggcgccggg

SEQ ID NO: 916 - DNA, 79 bp, Zea mays
  misc_feature: Incyte ID No: 700157796H1
  unsure 6, 21, 56, 61: a, t, c, g, or other
gagtgngagacccgcgagagngctgccgtgtagggaccgtagactcagcgactgcnaaggngggataaggggatggccg

SEQ ID NO: 917 - DNA, 257 bp, Zea mays
  misc_feature: Incyte ID No: 700157802H1
ggttggagatgatcgagatgctcttcttgtggattcacgaaatggaaaggtaacccctaccctagttggccatctggactactcatttgctacggcatggcacccggacagccggacattcgcgaccgggaaccaggacaaaacctgccgcatctgggacacccgcaacttgtcgacctcacttgcagtactgcggggcaacatcggcgcgatccggtgcatcgctactctccgacggcggttctggtgttctcgga

SEQ ID NO: 918 - DNA, 257 bp, Zea mays
  misc_feature: Incyte ID No: 700157804H1
  unsure 230, 252-253, 256: a, t, c, g, or other
catatcgccgatgctggaccttctgatgcgccccactacgtcggtcgccacctacttcagcctggaagagtggttcaaggacgcgggcgccaccgccacgctcttcgaggtggcgcacggcatgtccccgtggagcttgacgaagaacgacgccctgtacaacaagaccttgaacgacgggtgcgcggcggacagcaacttcgccatggacacgctcctgagagagcccnggccgcgggtatattcgcggcnnggnt

SEQ ID NO: 919 - DNA, 257 bp, Zea mays
  misc_feature: Incyte ID No: 700157805H1
gtcgaacaagaagcacctaagctggggcgtgctccaagggccccctcctcaccatggatgcccttttcgatgctttttgctgctatttccacgaaagtgcctcgttcggacatggagttggtcatcagatactatgaagaattcaaggttgtaggtgtccttttcctctcttttgaggtctccgtctgaatgcgttcaggatatgcatgctaaccatgtttggtggacttcttgattttgaaacagaggaagaggat

SEQ ID NO: 920 - DNA, 261 bp, Zea mays
  misc_feature: Incyte ID No: 700157806H1
  unsure 46: a, t, c, g, or other
caaggctgcaggtgtcgaaaaaggttcaaaagagccacaacggcanaaggtgggaaaggtaacagtggatcaagtgcgtgcaatagctcaagagaagttgccggacttgaactgcaagagcatcgactctgctatgaggatcatcgctggcaccgccgctaacatgggcatcgatgttgatcctccaatccttgtcaagaagaaaaaggtcctcttgtagtttgtttttgctggcaccaccagtgcccattttgagattat

SEQ ID NO: 921 - DNA, 78 bp, Zea mays
  misc_feature: Incyte ID No: 700157808H1
gttccaccagactgaggaaggagatgagatgattattctcccagattataatcctgcctgcttgtgcttgatttggtt

SEQ ID NO: 922 - DNA, 264 bp, Zea mays
  misc_feature: Incyte ID No: 700157810H1
  unsure 69, 216: a, t, c, g, or other
cctgcaagtgccggcggcaccagcaggtgttgcagccgccggcgctggccttggtggtcggcgcacganggatgccgctggcggcggcggtctccacttcagggtacaaattgcagcagtcgcatgggcacccgcagtcaggggggcagttgcaagtgcggcggcaccagctgcaactgcaactgcagctgagccggcccaatggtggcgcacganaggacgacgacgacgaggcgtagtatatatgtatgtagcagcgtctaa

SEQ ID NO: 923 - DNA, 261 bp, Zea mays
  misc_feature: Incyte ID No: 700157815H1
gaaggcagcgccgtttctgaagcctctgattgaagagcatactattaaatcattcatccaaggtttccttccgggaattgctctgaagatcttccttatattgctcccaagcatattaatgtttatgtctaaggttgaaggattgacctcaatatcttcactggagagaagatctgcatcaaagtattatattttcatattcttcaatgtgtttctggcaagcattattgcaggatctgctttagagcagctaaaaagcta

SEQ ID NO: 924 - DNA, 260 bp, Zea mays
  misc_feature: Incyte ID No: 700157816H1
  unsure 244: a, t, c, g, or other
cgaataaaagccctccccgttgcgcgaccctttctctctccacggctgtcgtccagcattctcaccatgctcgttccacggatgcgtgatcaccagcagctttatccgtgagttgtatactctttatctgcacacgttttgggcgcgttatatatattattattattcccctagcccctccattattctggagtccacgttctggaagttgacctttcacgtgtttctttttgtaatcattaanaatcaatttgttcaga

SEQ ID NO: 925 - DNA, 256 bp, Zea mays
  misc_feature: Incyte ID No: 700157817H1
  unsure 53: a, t, c, g, or other
cacaaagagaaattccacagccggggggcaaggctttaattgccccctctccntccctcgcctccttcaccatcccaccgagctttgcaacagctagtagcatgggcaagctgtgctgcagccaggaagacgacgagccggcgttcaacctcctggggctgctcgtcaccgtcgtcctcgccctgctcctgctcatgctgtgcacgccgccccgccgcaggctgcgtcgcctactacccccgttactgctaggaca

SEQ ID NO: 926 - DNA, 253 bp, Zea mays
  misc_feature: Incyte ID No: 700157818H1
cgtcaataagggccagcacgtatggctgtagatgttgtcgttatcagttctggctttgtcgtttgtgggcgattgtgaactagtagtatgtttgtttctatccgattcggaggcgatacttaaccatggatacttgttgtgcgttcgtttctgttcgcgtgtgactcttgcattgaatcaaccagctcaccactgcaccaggccgtggtgagtggtgacagtgatttcctgttattatggatggatatagaat

SEQ ID NO: 927 - DNA, 240 bp, Zea mays
  misc_feature: Incyte ID No: 700157823H1
  unsure 189: a, t, c, g, or other
gggagatattcccgggcgtccgtttcaaggtcgtgaaggtctctggcgtttccctcctcgctctcttcaaggagaagaaagagaagccgagatcttaaaacgctgcaagggtttgggcctggtggcgcaccccacacctgtagcgctcacacaagccatagcagacctcgtgttgacatgaaccagcangtgattttgccatagttttgttgagacatctgaattcgaactttatatccg

SEQ ID NO: 928 - DNA, 98 bp, Zea mays
  misc_feature: Incyte ID No: 700157824H1
catgcatgcaatgcatctcgtcgtccatcgcatgttgttgtcgttgttgtgtgtgttttcgatgatcctgtctctgttataaatatcattattattac

SEQ ID NO: 929 - DNA, 257 bp, Zea mays
  misc_feature: Incyte ID No: 700157826H1
  unsure 252: a, t, c, g, or other
gcgtcgtcacaactggccgcaagatcattggcgccactaaccccctggcttctgagcccggcaccatccgtggcgactttgctgtcgacattggcaggaatgtcattcatggaagtgacagcattgagagtgctaataaggagattgccctgtggttccccgagggccctgctgattggcagagcagccagcacccctggatctacgagaagtaaacatggaaagtttcacatcaaaccttgagagccagangaaaa

SEQ ID NO: 930 - DNA, 72 bp, Zea mays
  misc_feature: Incyte ID No: 700157827H1
aatccatttcggcatttccaacgccttcgccctaccagccacgtcgcttcgaggccgatcgaccgagcagct

SEQ ID NO: 931 - DNA, 120 bp, Zea mays
  misc_feature: Incyte ID No: 700157828H1
aattgacaaattgtggcacctctttagttgccaataaaatgaagcagagtaagactgggcaaacgatcaaatcatctggttatgctggtgcattaaccccaaaggagaacacaccaagag

SEQ ID NO: 932 - DNA, 254 bp, Zea mays
  misc_feature: Incyte ID No: 700157829H1
  unsure 66, 222, 249: a, t, c, g, or other
ggaacgctggggtttgctgtggcgaggtggttcgatcagatctgtcactggaagaacccgctgacnaccgtactgatccatgtactctttatgatactggttctatacccagagctgatactgcccacaatcttcctctacctgttcctgatcggggtgtggtactacaggtggcggccgaggcagccaccgcacatggacacccgcctctcccacgcaganaccgcccacccggacgagcttgacgangagtt

SEQ ID NO: 933 - DNA, 126 bp, Zea mays
  misc_feature: Incyte ID No: 700157830H1
aagatgtattgcaagctatagtcgaattatcagtagcacaacataaccctctgatatgttcgtggtttatccgtggtttctgaattgtagacttctgcgttgaagctcgtgctactgtttgttttc

SEQ ID NO: 934 - DNA, 89 bp, Zea mays
  misc_feature: Incyte ID No: 700157831H1
  unsure 2: a, t, c, g, or other
anaatgcatactttcgttcttctgatgacgcgctttctcattgcgcactgcggaacaatcgagacctgaactgaagggacttatttaga

SEQ ID NO: 935 - DNA, 247 bp, Zea mays
  misc_feature: Incyte ID No: 700157834H1
cacaaacagagacagcgttatggccatgatggaggcatttgtacatgacccgttaatcaattggcgtctgttcaatttcaatgaggttcctcaagtgtcgaactatggtaatgttcatgctcacacggttgtcagtagtgaagaagcagtggctaaccgagagctcatgcaacctcagcgaggagcacgtgagagggaacttctacaggctgtcaatcaactcggtgatgccatgaggttttgaatg

SEQ ID NO: 936 - DNA, 249 bp, Zea mays
  misc_feature: Incyte ID No: 700157835H1
aaaaaggctgcagaagatacatctaataccgaaaatatcaatgcctcaagctcaaacagcgattctgttatggctgaagcagaacttgcctcaaatgctgctgctggtgacaagcaagaacagccaaaggatgatgacgatctactacagcaggcacttgcaatgtcaatggagggcggtgcttcaggatctgcagctgtgactgactccgctatggcagaagctggtgcagttgaccctgacttagcg

SEQ ID NO: 937 - DNA, 89 bp, Zea mays
  misc_feature: Incyte ID No: 700157836H1
  unsure 35: a, t, c, g, or other
agctagcaacagaaaaatcatatgtattgtcaggnggcatggcctaaaaaaatggattttaatggtagaccctgattttggaactgctg

SEQ ID NO: 938 - DNA, 249 bp, Zea mays
  misc_feature: Incyte ID No: 700157837H1
  unsure 44: a, t, c, g, or other
tagagagagcatagtcgatcatgaagggtggcaagaaggaagtngccggtgcggtggtggccatactgctggttctgcagctcatggcagctccaccgacggccatggccgcccgctcgccgcgcggagccgtgccggatggctccctcgccacgacgcccaaggtgacgatgctgtcggccacgctgtgctacacgggggagacatgcaaatacactccctgcttcattcctgcttgctcctgcagct

SEQ ID NO: 939 - DNA, 249 bp, Zea mays
  misc_feature: Incyte ID No: 700157841H1
  unsure 2, 54, 106, 138, 158, 170, 181, 183, 189, 207, 243, 245: a, t, c, g, or other
cngaaacctcagacactctacatatatcctctgcgcgtgtatctcgtcgtacanagccgaaagctggagcttccaatggcgggagacaacgacctgaaggtgctcntcgtgtggacgagcccgttcgtgatccgggtncgcatcgtgctcaacctgangggcctggcgtncgagtacgtgnangagganctcagcaacaagagcgcnctcctcctggggtccaatccggtgcacaagagcgtncngttg

SEQ ID NO: 940 - DNA, 224 bp, Zea mays
  misc_feature: Incyte ID No: 700157842H1
  unsure 23, 42, 45, 51, 56, 59, 63, 123, 125, 136, 141, 147, 154, 170, 198, 202,208: a, t, c, g, or other
cgcaccgtcgagttccgcgcgtnccaagcttctccaccgtgncgngctgcncctcncancgtncatctcccatggcgccttggagtcccagctcggcctccttcctgcagccggttgtggttncncctcctgcagntcgtngggcangctcgcnagcttccaaacacganctcatcatcgtgtcatgcgtcacaaganatcncaagtnttgggtgaagaggagc

SEQ ID NO: 941 - DNA, 249 bp, Zea mays
  misc_feature: Incyte ID No: 700157843H1
atcccatccaacaacaacccacaggagcaggagctcgtctggccaaggtgaacacagatgccgtttttgacgcttcatctgagaccgtagttctgtaccctgaaaatggagggaacttgcactgctttacggcgctgaccccttgtgccgtgctggatgtgatgggccctccctacaaccgtgctcaaggaagggattgcgcgtattacagcgaatcgccctactcgtgtgctggagatgcacaatatt

SEQ ID NO: 942 - DNA, 213 bp, Zea mays
  misc_feature: Incyte ID No: 700157845H1
agcgtctgcttttccaatacgtagctgagatgttccattttgacataagttttgtatgctgtggttgctgtttaccttgtgaactgttgagctctactattgggtgtccgtttatctgtttatgtagcatcttgttatttcacctattgcaatacaagaatgctatatgacatatatgttagacatttgggcaatgttaaatggatttttact

SEQ ID NO: 943 - DNA, 250 bp, Zea mays
  misc_feature: Incyte ID No: 700157846H1
  unsure 56, 70, 72, 86, 107, 124, 191, 218, 223: a, t, c, g, or other
gagagaggctgtgcactggactcagcctgacaaacaggaacaagggcgggcagggnacccagacccagcnangccaaactgccgcnggtagccgacacagatctgangcgagcccggtccagcngggccgcgcaccgcacggagatctgtgactgtgagcttggagtgcaagggagccagccgccagcgangaagaggccgatgccgagctggatggnaccanaaggcattgcgttgcgtcctctcatct

SEQ ID NO: 944 - DNA, 132 bp, Zea mays
  misc_feature: Incyte ID No: 700157847H1
  unsure 26, 34, 45, 53, 71, 73, 78, 117: a, t, c, g, or other
ccaggcacccgctccgacggctcaancgcacgantgcgtcccgtncatcgacnagatcttcgccagcgggnangaggngaactcgaggccctcccgtcgccgaggctgatgaacacncacctgccctacgcc

SEQ ID NO: 945 - DNA, 263 bp, Zea mays
  misc_feature: Incyte ID No: 700157850H1
cgtgattctacattaaggccggcgcgtacatggagaacgtggaggtcgggaagaagcacgtcaacctcatgttcgtcggcgacggcatcggcaagaccgtcatcaaggccagccgcaacgtcgtcgacggctacaccaccttccgctcggccacagtcgctgtggtgggcaacaacttcttggcccgcgacctgacgatcgagaactcggccgggccgtcgaagcaccaggcggtggcgctccggtgggggcggacctgtcgg

SEQ ID NO: 946 - DNA, 173 bp, Zea mays
  misc_feature: Incyte ID No: 700157851H1
aaaagtcgagaccagaaaaaagaagacagagatattaaataacacagttaacacatgatagcccattttaacagtaataacatattttgcataaattttactctagcctagaggctaatgagtaatgacctcattacatttacaaaagagggagcgtgttctgaatacaaaag

SEQ ID NO: 947 - DNA, 258 bp, Zea mays
  misc_feature: Incyte ID No: 700157853H1
  unsure 53: a, t, c, g, or other
aacttccaaaagccggtcagataggaagccaccaggtgttggccgcggaagangaaggggggacgttggtgctaaacctggaggcagaggcatcggacgtggccaagatgatggaggtagaggcagtggtggccgaggaaggggtggagttggtgccaaaggtggtaacaaaggtgggggccgtggccgtggctaaatctggtggacacatgggagaatgccgctttttaaggcctgtaattgtgttgcatagattgc

SEQ ID NO: 948 - DNA, 257 bp, Zea mays
  misc_feature: Incyte ID No: 700157854H1
  unsure 180, 182, 186, 223: a, t, c, g, or other
gctgcggcggcatgctgtgcctcgacatgggcaccgaggagcgcgccaaccgcctcatgcaccacctccagaacaccacccagttcggcctcatggcgtcagcctcggctactacgagacgctcatgtcctgctccggcagcagcaccagcagcgagatgccgcccgaggaccgcgcgcncngggncatctccccgggcctcgtccgcatgtccgtcggctanaacggcacgctggagcagcgctgggcgcagttcg

SEQ ID NO: 949 - DNA, 258 bp, Zea mays
  misc_feature: Incyte ID No: 700157856H1
  unsure 17, 38, 52, 75, 85, 92, 101, 115, 175, 196, 239: a, t, c, g, or other
cggcaagtgcaactgcngctccagctgctcctgcggcnctcatgcaactgcntgtcccctgacgtggagaccgcngccgccagcngcatcangaccatggncctcgctgcgccgnccaccaaggccagcgccggcggcttcgaggcggccaccgagggcggcggctgcgactgcnacacctgcaactgcggcaccngctgcggctgctcctgctgcagctgcaactgagccggcccgcncggcccggcgatggcgcag

SEQ ID NO: 950 - DNA, 260 bp, Zea mays
  misc_feature: Incyte ID No: 700157857H1
  unsure 9, 17, 38, 43, 53, 60, 91, 116, 142, 146, 149, 153, 155, 160-161, 170,190, 196-197, 209, 224, 228, 240, 246, 253: a, t, c, g, or other
cacccaccncctccgcngccgacaacagcgtagtgtantgtanttccggaganggttggngatagtattagtgatccgcaatgtcgacggnggaggctgttgtggctgaggtcccngtgaccgaggtgccagcggaggtccnggcngcncatntngccgnngcgcccaangcgaagaaggcgcccaaggngaatanngcgcctaagganaataagccgtccgcngcgnagaagccggcgncgcacnctccctncgctgat

SEQ ID NO: 951 - DNA, 257 bp, Zea mays
  misc_feature: Incyte ID No: 700157859H1
gtgagcaagaccaagccggtgcctgtcatccggggcgtctacgacgcgggccaccgctgcttcggcgagaactacgtccaggagctcatcgacaaggcgcctcagcttcctgaggatgttgagtggcacttcattgggaatctgcaaagcaacaaagccagagccctacttgctggcgtgccaaaccttgatatggttgagagtgtcgatgatgagaagattgctaaccgtcttgatcgagtggtagctgacttggg

SEQ ID NO: 952 - DNA, 258 bp, Zea mays
  misc_feature: Incyte ID No: 700157860H1
  unsure 26, 230: a, t, c, g, or other
ggcgcggcgccgcgtcatcgcgcgcnacgacatgtacgacaccaacacgggcgccggcggggacggcgagtacctgccgctgtccatcttctggcaggtgccgcagtacgtggtggtgggtgcgtcggaggtgttcacgttcataggccagatggagttcttctacgaccaggcgcccgacgcgatgcggagcctctgctcggggctctccatgacgtccttcgcgctcnggaactacgtcagctccgcgctcgtcac

SEQ ID NO: 953 - DNA, 224 bp, Zea mays
  misc_feature: Incyte ID No: 700157861H1
gcagcatcgatctctcgtctatccgatccgcacgtatattatatactcatacgagtatatattaattcttccgagaattatatggatgtggtcccacacataccaagccaataaaactatatttgtccagtgaaataaactgaattacccaaatactcgactatactcgtgtctcgtcatgtctcacgaaatacaaaatacgtaagggtaaatatactattgtg

SEQ ID NO: 954 - DNA, 259 bp, Zea mays
  misc_feature: Incyte ID No: 700157862H1
tatcgtagtcgacactccatacttccgcatctacagtgaccggcgcatcgaccgcttggtcggcaccgataccgtgccggcgggctttgatcccaccaccggcgtcacctccaaagatgtcgttgtagacagcgacgccggcgtctacgttcgcctgtacctcccggacacggctacggggtccgatgattccaagaagctcccggtgctagtctacttccacggcggcggctttgtcacccactcggcagcgtctccg

SEQ ID NO: 955 - DNA, 259 bp, Zea mays
  misc_feature: Incyte ID No: 700157863H1
cagccaaggaagcagctttaacagccgaagaattgatgaggatacctgttgggagtaggagaaagtaccacgatgatgtgactgtcgttgttatcacccttggaaatgcacagaggacgatgactgcgtcaacatccatgtgaaagaatggagagctagagagacgggctatcagctggtaatttttgtgggtttttgcgtacgtgtcctccaaattacaagccctttttttttgttgagattggcgtgtggtagtcag

SEQ ID NO: 956 - DNA, 259 bp, Zea mays
  misc_feature: Incyte ID No: 700157865H1
  unsure 121-144, 177, 181, 188, 221: a, t, c, g, or other
gagtccatctgctcgttgccttgattttgtggaacgaagcgatggctcgcagcggcgccatggtttcctgcatgctgctcctggtggtggcggcgcaactgctcatggtggtgatggccannnnnnnnnnnnnnnnnnnnnnnngcgaccaacgcggacagcacgcctgctgctgtngcangtgaccngccactacagcgcctgtaactgccgcacttgcncgacatatggctgggcgtgctgcagcacttgctgctag

SEQ ID NO: 957 - DNA, 258 bp, Zea mays
  misc_feature: Incyte ID No: 700157866H1
aacaccgtgaagacgaaaagctcacaaacgagctagagctcgcgtgtgtgctcctccccctccccgaaaccaagagagatcagaacccccttgataccaccacctggaactaccgctacagttgcgtatatgggtttgtgtttttttgtttacagcccttgcgccattggtggcgccgtgaactcagtgtcagtgcctgcccgcttacctgtattgctgctgatgatgtatagagacgggcggagaggagaggagagc

SEQ ID NO: 958 - DNA, 253 bp, Zea mays
  misc_feature: Incyte ID No: 700157868H1
  unsure 61, 94, 103, 128, 150, 159, 180, 191, 225, 252: a, t, c, g, or other
ggaagtgagaggtcgtggtccgagaggcgtgcgtgcgtggccatggacggcgccgaggacnacgggacggagtggatgatgcatggtgccgganggaaggganaaggcggcggcgcgctcgacaagancaagaagcgcttcagcgacgancagaccaantcgctggagtccatgttcgcnacgcaggccangctggagccgcgccataagctgcagctggcgcgngactctgcctgcagccgctccaggttnc

SEQ ID NO: 959 - DNA, 254 bp, Zea mays
  misc_feature: Incyte ID No: 700157870H1
  unsure 36, 131: a, t, c, g, or other
ccactatgccggcggacggggaggcgctggcgccgnccgtccacttctggggcgagcacccggccacggaggcggagttctactcggcgcacggcacagagggcgagccctcctacttcaccacgcccgangcgggcgcccggcggctcttcacgcgcgcgtggaggccccgcgcgcccgagcggcccagggcgctcgtgttcatggtccatggctacggcaacgacatcagctggacgttccagtccacggcg

SEQ ID NO: 960 - DNA, 253 bp, Zea mays
  misc_feature: Incyte ID No: 700157871H1
  unsure 2: a, t, c, g, or other
anctgttgccccaaggaccatatgctacctgataaagaaagctaagagcgggtggtggccaaggctgctgaagcaggagggcaagccacctgtgttcttgaaggttgactgggacaaatggcaggacgaggatgatgaagatgctggatttaataactttggtgatatggacttctcgaaactggacataggaggtgctgatgacgacgatattggggatgatgaagatgatgtggttgaaagtgctaacaaa

SEQ ID NO: 961 - DNA, 166 bp, Zea mays
  misc_feature: Incyte ID No: 700157873H1
cagcacgttccaggcgaacctgaatctccttagcgcggcgctccccgccaacgcctccgcctcgccggcatggttcgccactggcgcagtcggtacggcgccggaacaggtcaatgggatggcgctctgccgcggcgatacgaacgcttcctcctgttcctcctgc

SEQ ID NO: 962 - DNA, 255 bp, Zea mays
  misc_feature: Incyte ID No: 700157876H1
ggttgtaacaccaaaaaaatcctaattttgggtgcaggaatttttttctagaagtattagattaaagtaatccttcttaaaatgaataaataggaatattaaaattttgatagttcaaaagttagattcaaactttgaaactgaaatttaatttgaaactaaaaaaaagggaggtcctccattatttaattaatgggaatattcatttacgtgtttggaaatcttctttaaaaacagtaaggtaaaagtatcctt

SEQ ID NO: 963 - DNA, 255 bp, Zea mays
  misc_feature: Incyte ID No: 700157878H1
  unsure 95: a, t, c, g, or other
ccgttccgctcggaagtctctctaccaccttctccccattccgctgttccgccctctcgcgtcgcgtgcctccaggtccctcctctgcgtaactnggtggccgccgatccgccgccaccgccctgcgtcaggtgttccggtgacaagcgtccacctgcaagatgttggaataccaaaacgcaattggggggagactgaagctgaagggtaaagcgctggacgtaaaggatggtggggtgaagaaaaagaagaaga

SEQ ID NO: 964 - DNA, 255 bp, Zea mays
  misc_feature: Incyte ID No: 700157879H1
  unsure 128-129, 131, 133, 135, 137, 140-144, 147, 153: a, t, c, g, or other
ctcaaacacaaagcgtccaaaagaaatcttcaagtgcaactattcagcgtgataagaaaggaaatgtacaagggccaaaactggatgacggaagcggtgggttccctccattccgctttggcaaaggnngngntngnggnnnnngcnggggangtggcagcaactactttggcggattccttctcttctcatgtgtgttgctcttggactacctgaaggaattcgagaagtacctgcttgctcagaggcaccgag

SEQ ID NO: 965 - DNA, 256 bp, Zea mays
  misc_feature: Incyte ID No: 700157880H1
ctgaaattctatctcaaccggttctgccgactgggtaacttgaattctaaagatgaggcatggtttggaagtcttccaagaagcagtcgtacccatgctgatatgaacagagatgaattggaagtttgttgctgcagccttaagcaagagtggtaatacttttgacacaacaaggtctatggtactcatatctgaatcagagaaagctaacctaaaggatagggcaaggaggctcctttctaagcctatcaagttt

SEQ ID NO: 966 - DNA, 252 bp, Zea mays
  misc_feature: Incyte ID No: 700157882H1
  unsure 160: a, t, c, g, or other
gttccagtcgacgccgtacgtggtgaccctcttcagctgcatgctgtggatcttgtacgccctgctcaagcccggcgccgagctgctggtcaccatcaacggcgtgggctgcgtcgtcgagaccgtgtacctggccatgtacctggtgtacgcgcccaangccgcccgggtgctggcggccaagatgctgctggggctcaacgtcgccgtcttcggcctcgttgcgctcgtcaccatgcttctctccgacgc

SEQ ID NO: 967 - DNA, 250 bp, Zea mays
  misc_feature: Incyte ID No: 700157883H1
  unsure 201, 205, 210-211, 214, 216-217, 220, 229, 237: a, t, c, g, or other
ctcctccacgcgcactactacaagatccccggcgtcttcaccaccgacttcccggcatacccgccggtgcagttcgactacacggggcagaacgtcagccaggccctgtggcagccggtccccgccaccaagctgtacccgctcaggttcggctccgtggtgcagctcgtcctgcaggacaccagcatcgtcacgcccganaacnacccnntcnanntcnagggtaagntttttcancctcgccgagggt

SEQ ID NO: 968 - DNA, 251 bp, Zea mays
  misc_feature: Incyte ID No: 700157890H1
aggtaggatgctcccgcctgaacttgtgaacaacattcttggagtgagcttggcaaacttccctgacctatcaaagattgtattgagagagtgtgacaatgaattgtcaagaaatttcatgaaaatactaagatccctgcgggagaaggatccttcctatcaccagctatgccgtgtggtgcgacagggtgaacagccaagagaaggctatctgcttctatctaaccttgttgaggaccagatggctggaa

SEQ ID NO: 969 - DNA, 242 bp, Zea mays
  misc_feature: Incyte ID No: 700157891H1
  unsure 2: a, t, c, g, or other
gntttcacggagacagcaagggccaggattgtcaatgctggtggcgagtgccagcacatttgaccagcttgctcttcgtgctccacttggcgagaacacggtcttgaggggccccaagaatgcccgtgaggcagtgaggcactttggcaaggctcctggagtgccgcacagccacaccaagccgtatgtgcgctccaagggaaggaagttcgagaaggctcgtggcaggaggaacagccgtg

SEQ ID NO: 970 - DNA, 251 bp, Zea mays
  misc_feature: Incyte ID No: 700157894H1
gttaaccataccctctgccttggtaattttatccggaactctgctaaaggaggttcatatccccaactttccatacgagcaggcccataagaagttcgtagaagcaagtggaaaatgttaacagctttgaaatgtcctgaagtatggcgaccatgtgtttacatgtacatatcacttgcgttgagtgtcgacatccaagaaggaatgttcttctggtacacggaccaaagcgcagggttatcttttcatga

SEQ ID NO: 971 - DNA, 232 bp, Zea mays
  misc_feature: Incyte ID No: 700157895H1
gcagcgggtcctccgtctgcgagttctccatccagggctcctactcgctccgctaccagaccaagatcaccggaaagatcgcccccgaccacctcaccgacctcgagggcgtctccgtcaaggtcctcttcttctggctcaacatcgtcgaggtcacccggcgcggcgacaacctcgagttctccgtcggcatcgtctccgcggacttcgggattgaaaacttcctcgagtg

SEQ ID NO: 972 - DNA, 266 bp, Zea mays
  misc_feature: Incyte ID No: 700157905H1
gtggattttatatctatagcatcggtgctcttgttgcttgggaaacccgcagaaaagattttgctgtaatgatgtctcatcatgtaataacatctactctaattggagtttcatatctgactggatttttccgaattgggaccatcattctcgctcttcatgatgcaagtgatgtgtttcttgagactgccaaattgtgcaaatacacagaaaaagagctgggtgctagcttgttttttggtctcttcgctatctcctggcttcta

SEQ ID NO: 973 - DNA, 116 bp, Zea mays
  misc_feature: Incyte ID No: 700157908H1
gacaccactcaacaaatttagttaccgaactctcgatcctgtgttacagcaaatcctatggttatgtggaactctggtgctgtaattctcttgtatgctacccagtatgccgcagg

SEQ ID NO: 974 - DNA, 265 bp, Zea mays
  misc_feature: Incyte ID No: 700157909H1
  unsure 48: a, t, c, g, or other
ccgctccacaggatcctctgcgccaccgcaaccgtgtgaccgcccgtnccgccggcgatcccgatccgccgacccgtcccagccccgctcgcagccatgtcgccgtcggagccgacgcgggaggagagcgtgtacatggccaagcttgcggacaggcggacggtacgaggagatggtcgagttcatggagcgcgtcgccgctacgccgagtccaaggtcttctacctcaagatgaagggtgactaccacaggtaccttgctgagt

SEQ ID NO: 975 - DNA, 265 bp, Zea mays
  misc_feature: Incyte ID No: 700157910H1
  unsure 61: a, t, c, g, or other
catcccctccggtgatgccattttcatgaagtgggttctgacgacgtggaccgacgacgantgcacggccatcctgaggaactgccacgccgctctgccggacggcggcaagctcgtggcctgcgagccggtggtgccggaggagacggacagcagcaccaggacgagggcgctgctggagaacgacatcttcgtcatgaccacctaccggacgcagggagggagcgctccgaggaggattccgccactcggcgtcgacgccgca

SEQ ID NO: 976 - DNA, 268 bp, Zea mays
  misc_feature: Incyte ID No: 700157911H1
gccaccacctaccagacagaggctggaagcgacggcgctgccggagatggagacggagacggaggcggcagcggcgaggcgggcgaaggagtctctggagctggctttccagatgtcccagatcctcgacaccggcctcgaccgccacaccctgtcgctgctcatggcatctgcgaccgcggcgccaaccccgaggcattggcagccctcgtccgcgagctctcctctgctgctcccccaacctccgccgcggcttcctctaccgtga

SEQ ID NO: 977 - DNA, 268 bp, Zea mays
  misc_feature: Incyte ID No: 700157912H1
  unsure 4, 266: a, t, c, g, or other
aggnctggaggtggtggtggaaagctttctttgcttctggaacagtggccctttatgtgttcctttactctatcaactacttggtgtttgatctcagaagcttgagtgggccagtttctgctattctctacattggatactctttcgttgtctcccttgccattatgctagcgactggtaccgttggcttcctgacgtcgttctcttgtccactaccttttctcatcagtcaagattgattgaagatccagggttgtctttacacnaa

SEQ ID NO: 978 - DNA, 270 bp, Zea mays
  misc_feature: Incyte ID No: 700157913H1
cgatccattccacacaaccaccactgctcttgccccagcccgccgcaggagttgccagatctgctccggtcacaggagctccgactccgagccctctccaatggcggttaaggtctacgtcgtgtactattccatgtatggacatgttggcaaactagctgaagagatccagaaaggtgcctcgtctgttgaaggtgttgaagctaaaacatggcaggtccctgaaaccctccctgaggaagtgcttggaaagatgggcgcaccccctaa

SEQ ID NO: 979 - DNA, 159 bp, Zea mays
  misc_feature: Incyte ID No: 700157915H1
ggacagaccaaactatccacctttgtttgatatgataaagggctatgtatgaggcacgcgtcccattatttttgtttttattataagactagacctcgttccgtaagatacatgtatcaatattatataaaaacaaaccatcagttcttgtgctgcact

SEQ ID NO: 980 - DNA, 274 bp, Zea mays
  misc_feature: Incyte ID No: 700157916H1
gtgaaatgttacaatagtagagttgtaaaaaagaaggtgcctctggaaattttgaaagactacttgtgttttcacttcttgtgctgccaagaatgtcagtcacttcgtgtccgtctagaaggaatggagaagtgtgaagagattgccttccttggacggataagatccaatatttgttggcggcttttaagtagcgctgacgcaagtagggatgttaaactctacttgtctcaggtcatcgacatcttcaaagatgcatttttggaatctactg

SEQ ID NO: 981 - DNA, 162 bp, Zea mays
  misc_feature: Incyte ID No: 700157918H1
  unsure 2-4, 67, 114, 117, 121, 127, 129-130, 136-137, 145, 147, 149, 152-153,158: a, t, c, g, or other
cnnngcattgcactagctagaccttgggctcgcaaacctcacacacccttccgcttaacctgcagcncttcgatcatcatcagcactcagcagtagcataggcatcaaggtagngancccnacaatncnntacggnncggcggcngngnagnngcgtngtcg

SEQ ID NO: 982 - DNA, 262 bp, Zea mays
  misc_feature: Incyte ID No: 700157919H1
atggattgaagagagatgtggctgcacatgtggctatgtgcgatgtgtgtcaaagagttaaggctgaacactagaggtcagctggactactgcacccactgaagatacccgagtggaagtgggaagagattggcatggattttattactggattgcctcgcacccagaaaggatatgatgctatatgggtgattgtgaatagattgactaaagtagctcattttattcctgtcaagactacttataaaggttctcagctagc

SEQ ID NO: 983 - DNA, 261 bp, Zea mays
  misc_feature: Incyte ID No: 700157921H1
  unsure 223: a, t, c, g, or other
ccgctttgggctggaagaagctcacggaaaaggacaagctctgcagtttaactggttgtatgagaaaggggcttttgtgttgcagtctgacggaaaattctcagttgattttacaatggttgaggatgctgtagaaagcctgagcagggagatactgacaatacaggcaaagggcgataagccttctgcccaatctcttctccagtcccgtgcaacattgacnacaaccattgagaatggcattggagagatagagcccat

SEQ ID NO: 984 - DNA, 261 bp, Zea mays
  misc_feature: Incyte ID No: 700157922H1
  unsure 54-55: a, t, c, g, or other
ggagctgagactacaaaagaatttgtggagaaactgaatcttaagcctgggcannaaggtgcttgatgttggatgtggaattcggggaggtgacttttatatggctgagaagtatggtacacatgttgttggtattgacctttccattaacatgataatgtttgcccttgagcgttccattgggtgtaagtgcttagttgagtttgaagttgctgattgcaccacaaagacatacccagaccacatgtttgatgtcatcta

SEQ ID NO: 985 - DNA, 258 bp, Zea mays
  misc_feature: Incyte ID No: 700157923H1
  unsure 243: a, t, c, g, or other
caagatatatcggcaaaaagaagactcgagaagaccgggcacgagaggcctcctatctcagtaatgagaatgagaagtacaagaaagctaaagactatgtgaacatgctgaaggactggtacggcaatggagcgtcgaagctgtgcgtgatctacaaccagacgggcggaaccctgcggtactcgacgacaaggatggctgggctacccggggccgacgccctacccgacggagatcggcaangggcatgggcgtcct

SEQ ID NO: 986 - DNA, 261 bp, Zea mays
  misc_feature: Incyte ID No: 700157927H1
cctggctgtactgaagatcatcaagcactgtgaggagtttgcgccactttagttacaggtcaattgcttggtttggatgttggtagtgttctggaagtgaccaactgttttccgttccctatcagggaagaggatgatgaagcagatgcagatggtgccaattatcagcttgagatgatgaggtgtttgagggaagttaatgttgacaacaatactattggatggtatcagtcttgcttgcttggatcttttcaaactgtg

SEQ ID NO: 987 - DNA, 172 bp, Zea mays
  misc_feature: Incyte ID No: 700157928H1
  unsure 111, 165: a, t, c, g, or other
gctgatcctgatcatcactcttttcccgacacaaagagggcaccaagaatcccctccatcgacgacgaaggcgatggcgccgctgccgcaggcgttccacctcctcctcgncttcgccctcgcgcttggctgcctgtcgggcggcgccaccgcgacggtggtgangacgtgc

SEQ ID NO: 988 - DNA, 259 bp, Zea mays
  misc_feature: Incyte ID No: 700157933H1
ggccacacaatgtgcaaaaactgcatccttggtcttcactgggcagttgtcaagttcccgtcccttcctatccagctgcctttgttcatctcatgcccctggtgcaacctgctgtctttccgcctggtttacaagggcaacctcaggttcccacgcaagaactactttctgctctggatggtcgagagcatgaacggtgggagagcaaaattccattccactaaccatgacgagcatcattccacgtggcattcaagtg

SEQ ID NO: 989 - DNA, 258 bp, Zea mays
  misc_feature: Incyte ID No: 700157934H1
gcagcggcgcacgtacgaccgcctcaagctgcacctgcccaagcagttctgcggccagctcctgcgtatgccattcccggacggctacccggagtacccgacccgccgccagttcgtcgactacctcgagcgctacgccgccgagttcaagatcaagcccgagctcggcaccgccgtgctgtctgcgcgctacgacgagacgtcgtcgggcatctggcgcgtcgtcaccaacggcggcgacatgaagtacatttccat

SEQ ID NO: 990 - DNA, 255 bp, Zea mays
  misc_feature: Incyte ID No: 700157936H1
  unsure 78, 114, 140, 159-160, 249, 254: a, t, c, g, or other
gtttcaagtgatgaaactattgagactgccaaggctcttgctctgaaagaagggttgttggttggaatctcttctggngcagctgcagctgggcagttaggcttgctaagaggncagaaaacgccggaaagctatttgtngtcgtgttcccgagcttcnncgagcgctacctctcatcggtgctgttccagtccatcaagaaggaagcggaaagcatggtggtcgagccctagagcacacagttctggncttcng

SEQ ID NO: 991 - DNA, 256 bp, Zea mays
  misc_feature: Incyte ID No: 700157937H1
caagaattgctaaattcacaacggaactatctaggccagctgttatattagacaaattgcgtgaactatcttggagtggtgtgcctccatatatgcgacctaatgtatggcggcttcttttgggatatgcaccgcctaataaagatagacgagaaggtgttctaacaaggaaaaggctggagtacgtggaatgtgtttctcaatactatgatattccagatagtgaacgctcagatgaagaaattaccatgcttcg

SEQ ID NO: 992 - DNA, 256 bp, Zea mays
  misc_feature: Incyte ID No: 700157938H1
  unsure 5: a, t, c, g, or other
caggnctcgtgcccaacatggacaaggtataactactacgtgagtagttcatctatggcgtcgcaatttgcaaaggttttcttgcgcgtaatgcatagattaattctaagagatcgaggcggcgtcgtcagaccactcagatgatacatatatagaatgatgatcactgtgcaaagcagcagttctcccttgtgtatagtttgtgcatctagctagctaatacctgcagtcctgcacgaggcacacagcaataatg

SEQ ID NO: 993 - DNA, 262 bp, Zea mays
  misc_feature: Incyte ID No: 700157943H1
  unsure 4, 21, 23, 79, 97, 127, 132, 135, 153, 155, 186, 193, 203, 205, 218,225, 233, 238, 250, 256: a, t, c, g, or other
gcanaccctagcgagcgatanancccggagccgagagaccagccagccatggcgctgcgtgccctgtacaacgagatcnggagcatgaaggtccgcnacgtgccggcttacctggagccgctgcttngcctnggncagcgtcaagaaagagcncngaccaggccgtcgaccgctacatcgggaagnacatcgncacgatgtcncngtaccctctttanaagtctnctatccgnagggnatgatcttctcntacttnatcaaa

SEQ ID NO: 994 - DNA, 259 bp, Zea mays
  misc_feature: Incyte ID No: 700157945H1
  unsure 52: a, t, c, g, or other
cagaaactttttcttgcacatcctcaacgcgactagtgtatatgggacagtnggggagcgaaggcttgaacccaaagagttcttaaactagctcttcataggcaaaagccaagaaccattagctcaacggttaactctaaccaaagtctttgagttctgaccaatggcttggggcctcaaccaaaatggaggcattcccaacttactttggtcgcgaagggtgactttggaaggaaagcgttcgttcaattagaccact

SEQ ID NO: 995 - DNA, 259 bp, Zea mays
  misc_feature: Incyte ID No: 700157946H1
  unsure 16, 75, 88, 164, 175, 191, 203, 222, 226, 231, 247, 253, 256: a, t, c, g, or other
gaagcaacttgttgcnagcctcctctatggcgagctccgaccatggttccaccaccgcccccaaggacgtgccgngcagctacggccngccgctggtgggcgccgtgcggaccgcctcgacttctactacttccatgggcaggacaagtacttcgagtcccgcntggagcgtacngctccaccgtggtgcncatgaacgtgcngccgggccccttcatggtngcgngaccnggggtggtgggggtcntgtaanacnaga

SEQ ID NO: 996 - DNA, 262 bp, Zea mays
  misc_feature: Incyte ID No: 700157947H1
ggagaagaagaaggcccgacgctctcaccgctgccaccaaaatcgcacgcgagccccaagagatccccaaaccctacacctgcccgccggcgcactcggggaccgtcgaatcgagcaggttgacggaggagagggagcctcgaagatgttccggaaccagtacgacaccgacgtgacgacatggagcccccaggggcggctgttccaggtggagtacgccatggaggccgtcaagcagggtccgcctgcgtcgggctccggt

SEQ ID NO: 997 - DNA, 261 bp, Zea mays
  misc_feature: Incyte ID No: 700157948H1
  unsure 217: a, t, c, g, or other
gcttcatagaaatgagcttagtggtgcacttactggtttgacacgggttagaagattccagcaggatgatgctcatatcttctgcagagaggaccaaatcaaggacgaggttaaggctgttttggaattcatcaattatgtttacgagatatttggcttcaagtatgagttggagttgtctacgagaccagagaagtatctaggtgaaattgaaacntggaacaaagcagagcaacaattgacagaactttgaatgagttg

SEQ ID NO: 998 - DNA, 265 bp, Zea mays
  misc_feature: Incyte ID No: 700157949H1
cccaagaacaaaaatggccaccgccaccactgaagccgaagtccgtgagtccctcggcacgaagttcggtcgcctcaaggaacaggcgaaagacatggcctccaggcaccccgtcgctggagccgcggccgtcatcgctgtcagcgccgtgggccctacttcttgtggcccgtggcggccccggccgtggccatgatgaaggcgcctggatccggcggtgtgctcgtctcccgcgcggcgtttctcgcgaagaaggagctgtatt

SEQ ID NO: 999 - DNA, 265 bp, Zea mays
  misc_feature: Incyte ID No: 700157951H1
  unsure 61: a, t, c, g, or other
tgcagaagttcgcgctccgggagcaggccagggccatgggcagcatctccagctccgagcngcaggatggggcagggacgaggagcaagctctgatctgaactcgcatgcccacatggatgtctcctccattccactgacgagtagttgagcagcaacgaacctaagtgtgctgagctgtgctgtgctgtgcttggacatgtagagaaagagaatcaccacactcagtgatacagattcgtcatttcagtaatataatttacagt

SEQ ID NO: 1000 - DNA, 123 bp, Zea mays
  misc_feature: Incyte ID No: 700157952H1
  unsure 98: a, t, c, g, or other
catgcgcccggtgctgtgctagggcgcagagaccatctgatggtggaaacaccggaaataagagcgtgccgctgtgtgtttcctttgaaggaatgaanatggtgtttgtgttgtgcattgatt

SEQ ID NO: 1001 - DNA, 263 bp, Zea mays
  misc_feature: Incyte ID No: 700157954H1
  unsure 156: a, t, c, g, or other
cgtcctcctccattaatattggcagcaagctaggatcatcagcatctgagcttattattactaaatcgatcggttgccatggcggggatgagagtcggcaagctggcgctggctgcggtgctgctgtgcgcggcggcggccatggccacggcgcanaggcctccggcgtgcgcgccacctacaacttctacaacccgcagcagaacaactgggacctcaacgccgtgagcgcgtactgcgcgacgtgggacgccagcaagccg

SEQ ID NO: 1002 - DNA, 264 bp, Zea mays
  misc_feature: Incyte ID No: 700157956H1
  unsure 129: a, t, c, g, or other
ccgttgtgctccgcgaggaaagcgaggaggcggccggctcggtgctgagtgctgagttgttgaccaacgggaagtccagtacccaagcggagccaccaaggaaaggaggaatggaagccaccggcgcanctcgcagccctcggcgccgcagacaactcacccggcggtggcgccgctggccttcctactggggaagtggcgcggggaaggcgagggcagcttccccaccatatcctccttccggtacgcgaggagtcctcttct

SEQ ID NO: 1003 - DNA, 195 bp, Zea mays
  misc_feature: Incyte ID No: 700157957H1
atcagattgtctagtgtcttctttgtaataaatttatctgttcttggtactttgtctatggttgaatcggaacccattttccgtttgcctagattcttaatttctggtgctgtatccagctgaaactagtagatctatgatcttgtggctgcagcatgttcttgtcacttttatctggtctccgttggttcggtt

SEQ ID NO: 1004 - DNA, 265 bp, Zea mays
  misc_feature: Incyte ID No: 700157958H1
gaaagcccagcagcttgagagagacttgagtgctgcagccacagaatcagttgctgctgacaaaaagcttgctatatttgataaaatattttctgcataccatgatgctcggagctgcatccgcaatgacctggcttctgctggcaatgctgaggatataaaagatgacctgaatggtcttgacaaggctgttagtgctgttctaggattgagaactatagaacgtaaccagttacttgttagcattggtaaaagtaaattcaca

SEQ ID NO: 1005 - DNA, 265 bp, Zea mays
  misc_feature: Incyte ID No: 700157959H1
gttttcttgaagcagcgcgctttggaagtactgaacttgtacgcattctgctgaaggtcgcatatcagaatagcttggctgtggacaccgatctggctctggtgtatgcctcacattactgcaagttcaaaacaatggaatgcctagttgatgaagggaacgtgagttctttccttggccctctgataaaagctgcagagcgtgggtgcttgcaggttgtccactggttcgtcagtcgaggcgtctctgacattgagatgtgcct

SEQ ID NO: 1006 - DNA, 265 bp, Zea mays
  misc_feature: Incyte ID No: 700157961H1
gctgaacagcaagcactacaccaccaaggtcatctcggcggtggttgtcgtggccgccggtgtcgggatttgcaccgtcacggatgtcgaggtcaatgccaaggggttcatctgcgcttgcgtggcagtgttctgcacgtcgcttcaacagattacaattggttcctttcaaaagaagtacaacattgggtcatttgagctgctgagcaaaactgcaccaatccaggcaatttcactcattatactgggcccctttgtggactac

SEQ ID NO: 1007 - DNA, 266 bp, Zea mays
  misc_feature: Incyte ID No: 700157963H1
ttcaaatttctcattgttccctcagttcatgtttaatctgcggcgttcacaatttgttcaggttttcaataacagtccagatgagacagcttatttcaggatgttactcaatcgcgagagtatcactaactcggttgccatgatccagccttccttgatatcattttcctttgattcacctccatctccggtgtttctagatgtggcatcattagcggcagatcgtatactgctacttgatgcgtactttagtgttgtcattttcc

SEQ ID NO: 1008 - DNA, 269 bp, Zea mays
  misc_feature: Incyte ID No: 700157964H1
  unsure 115, 194: a, t, c, g, or other
aaagtcgttcgtgcccatctctctcatcaacgagacgagctggttccagaacgtttcgaagctactggacgcgtcacactacgacgagcgtaagatcatggcgaagtcgatcttntacgtcggggagatcggtgtcaacgactacttcgccgccctaagcaacaacgactccgtcgacgtcgcggtcagcctgntgccgcacatcatcgacaccatccgttcggccctgaccgtcatgatcgatgccggggcgaggacagtggtgatca

SEQ ID NO: 1009 - DNA, 258 bp, Zea mays
  misc_feature: Incyte ID No: 700157965H1
aagaactcgtgaaaggacccctactcctggaaaatactgtggtcgaagaggaggatctcaaaggagcccatcaccttaccgccctcgcagaagggagcgttcgcgctcaagggaacgcagaagggagcgttcgcgttcaagggatcgaagggagcggtctcgctcaagggatcgaagggagcggtctcgctcaagggaacgccgaaggagcggtctcgttcaagggaccgcaggagaggttcgctcaagggaccgccg

SEQ ID NO: 1010 - DNA, 260 bp, Zea mays
  misc_feature: Incyte ID No: 700157966H1
accgaactagcgaagaaaaggacgcggggcaccatggcgacggcacaggcagcgtcggcgtccccaacccaccaccgcgcgtctccagggatgtcgccgccgcagccgccgtaccccagcgccgccaggatcgccgactccgcctgcttcccccagtacaccgcctcgctcaagtgtttggaggccaaccaggacaagaccaagtgccagcagcagttcgacgattacaaggaatgcaagaagaaagagagggaggctcg

SEQ ID NO: 1011 - DNA, 259 bp, Zea mays
  misc_feature: Incyte ID No: 700157968H1
caggtttgtatgaggattccattcgatactatgtaagggcagttgcaatgaacccaaaagctgacaatgcctggcagtacctgaggatctctcttagcaatgcttcgcgagcggacatgattgctgcatgcgacgcccgcaaccttgacgctcttcagaaagagtttcctctgtgagccctccggtccaaggcattagagcttccatggaaggaagcagcacactagcaagcccgagtgactgcacctgtggtcatgga

SEQ ID NO: 1012 - DNA, 259 bp, Zea mays
  misc_feature: Incyte ID No: 700157970H1
actacgccgggtgggcggacaagatccacggcctggtggcgccggccgacggcgcgcaccacgtgcaggtgctgcacgagccggtcggcgtggccggccagatcatcccctggaacttcccgctgctcatgttcgcctggaaggtcggcccggcgctcgcctgcggcaacaccgtcgtcctcaagaccgccgagcagacgccgctctccgcgctctacgtggccaacctcctccacgaggctgggctccccgagggcgt

SEQ ID NO: 1013 - DNA, 202 bp, Zea mays
  misc_feature: Incyte ID No: 700157972H1
  unsure 4-5, 8, 27, 43, 51, 56, 59-60, 64, 67, 70, 83, 113, 124, 134, 141, 149,151-152, 154, 157, 163, 197: a, t, c, g, or other
atcnngcnagaagcaagcagcagtaanaagaaaccatcatcgntccatgtntccancannggcngcnctnggaggacggcggnggagggcgtcgtcagcggccctcctgctancctcgttggcngtggccctgntctcccnggccggcncnncnacngccgcngggaacaagaccgggcaggtgaccgtgttctggngccgg

SEQ ID NO: 1014 - DNA, 259 bp, Zea mays
  misc_feature: Incyte ID No: 700157973H1
catttttgctggacaaaaacggtttccccactttcgttagtggcgttccacctgatgcatttagtgaaacgcgtcaactatggaacagtccattgtacgactggaaagctatggaagcagatggtttttcatggtggataaagaggattaaacgtgcccttgatttgtatgatgaattccgtattgaccatttccgggggcttgcgggtttttgggcagtcccttctgatgcaaaagtagcactggttggaagctggag

SEQ ID NO: 1015 - DNA, 261 bp, Zea mays
  misc_feature: Incyte ID No: 700157975H1
gcgccgagagatttgggactggctcttcaagtgtaaaggaggaagagaagaagaagtccagggctgagaggtttggccttgcctcgccctcttcttcagatgaggaagctaagaaaaaggcccgtttggaacgatttggtcagagcgcaaatgtcgacaaggcggaagaagaaaaaagaaaggcccgagctgcccggtttgcagaagcgtctggtggatcagcagctcgggaaaacggcaaagacagctccaagccggacg

SEQ ID NO: 1016 - DNA, 261 bp, Zea mays
  misc_feature: Incyte ID No: 700157976H1
  unsure 12: a, t, c, g, or other
acggcgattcangaggggatagcatcgtcatcgcaaaatgcaggctctcctgctccccgcgcgggccgcgccgccgacgccggcgatgcttcggcagcgtgcggtttctgcctccgcgtgtgcgtcgcaggtctgccgccccctattcggtgccgccagttgcatctcctgtggggtccacggaagcgttcggcggcacctcacagtggcggtggcggcggccccgccctcgccttcgtcctcaccttcgtcgggaccgct

SEQ ID NO: 1017 - DNA, 260 bp, Zea mays
  misc_feature: Incyte ID No: 700157977H1
atctggaaggcatttagccccacaaccatcaacagtggtcgtggtgctgaattcgaaggggctgtcattgcactgttccatctgttgattacgagaaccgataaagtccgtgctcttcgtgaggctttctaccgccagaaccttccaaatgtgaccaatttgcttgccactgtcttggtattcctcatagttatctatttccaaggcttccgtgttgtgcttccagtgagatcaaagaatgctcgtggccagcaaggctc

SEQ ID NO: 1018 - DNA, 261 bp, Zea mays
  misc_feature: Incyte ID No: 700157978H1
  unsure 89: a, t, c, g, or other
aacagggcggccagacagggctcccacagaccatcaccacaacacacaaagacagctcagagctcacacacaggctcctctcccccgtngcgcaacgcgctttcccccacttcacccgcctcggcgccatggctaagctcgcgctggcgctggcgctcctcctcctgctggccgtggcggcgtccgcgtcggccagcagcgggagccacctggatctcgacctgggcttcctctcctctggggaccgccggaggagtgccg

SEQ ID NO: 1019 - DNA, 263 bp, Zea mays
  misc_feature: Incyte ID No: 700157979H1
  unsure 2, 21, 107-108, 110, 112, 154, 160, 195, 243-244: a, t, c, g, or other
gntccaaacagcagcagctcnaaaagcaggtctgggacactaggacccccgtttctgtcaccggtgaacgaccacaggaacctgctaatgggaagcccaatccgtcnnancnagatggtgtcacggcagaggtgaaggcggtgaaggctcccgnagagancggcatcactgctcctgttgtttcctatgcagcanaggtggcccagacagcaccagagaaacccgtcctctccaacggagtcnncaagaccggttaactcgac

SEQ ID NO: 1020 - DNA, 253 bp, Zea mays
  misc_feature: Incyte ID No: 700157981H1
  unsure 13: a, t, c, g, or other
agggtggcaaganggaagtggccggtgcggtggtggccatactgctggttctgcagctcatggcagctccaccgacggccatggccgcccgctcgccgcgcggagccgtgccggatggctccctcgccacgacgcccaaggtgacgatgctgtcggccacgctgtgctacacgggggagacatgcaaatacattggctgcctcactcctgcttgctcctgcaactatagtgatcgtctatgctacatcatatt

SEQ ID NO: 1021 - DNA, 251 bp, Zea mays
  misc_feature: Incyte ID No: 700157983H1
taacaatgtgctaatgcagcaggtaagcaaagcgctttatgctgaatttttgggtgcacaaaagaagcagcagccattcaagggattgggtttggaacacttaaatggctcgagccctgttattcctgataagctgacaagtagcatattaaggagctccaagttccagatggacctgttctgcttaagggagagagatttactgaagcagtttgtagaggaggtttctctccatcttgcacaaggcgaaa

SEQ ID NO: 1022 - DNA, 253 bp, Zea mays
  misc_feature: Incyte ID No: 700157984H1
gactctccgtggtttatatccggtggagactatttcaacagtgggcagaatttgtgctgaggcagagaaggtatttaaccaagatttatactacaagcggactgtgaagtatgtgggagaacctatgacccacttggagtctattgcttcttcagcagtgcgagctgcaatcaaagttaaggcatcagtcatcatttgcttcacctcttctggacgagctgcaaggctcattgctaagtacaggcccagcatg

SEQ ID NO: 1023 - DNA, 248 bp, Zea mays
  misc_feature: Incyte ID No: 700157986H1
  unsure 241: a, t, c, g, or other
agagaacgcccccgggatcgccccggaggttgcaggtgaaggcggccatatgggtcgtcaccaccgccctgacggtcatgttctccggcagagttgctccgttgatgcctgcgcccgtggccgccgtcgtctggtccatggccgcggtgacgatccttgcgggcttctacatgttcttcgtatgcccggacgccgccgaagagaggccgaccagcaaagttgttgccgaagccgtagatanttgtgtg

SEQ ID NO: 1024 - DNA, 254 bp, Zea mays
  misc_feature: Incyte ID No: 700157988H1
aagcaacaaacttggcattcttgcctgttcttaattattgccaggacaggagaaacaaagatgaggcctcagctgatactcgtcggcactctggctgttctcgccatcctcgcagctctcggcgaaggctcgtcgtcctggccctgctgcaacaactgcggtgcttgcaacaagaagcagccgccggagtgccagtgcaatgacgtgtcggtcaacgggtgccatccggagtgcatgaactgcgtcaaggtcgg

SEQ ID NO: 1025 - DNA, 254 bp, Zea mays
  misc_feature: Incyte ID No: 700157989H1
acatactctacggcgagtcgatctgcggcaagggatacgtcgacgccatgaacgttataatctcgcactaccagtattaccttgacctcatgggcgtcggccgtgagcactctggcgacaaccgtgattgcgccgagcaggcaccgttcaacccctccagcccgacggatgaccagaagcagcagcaatcaggaagctaagacggacggactcattgcgccattgccactgatcaagcttccacagcgctagat

SEQ ID NO: 1026 - DNA, 254 bp, Zea mays
  misc_feature: Incyte ID No: 700157990H1
  unsure 102: a, t, c, g, or other
tacccaccgcacctaccattctggagaggagaggaacagagccaagaaacaagcccggaagatggcaggcggcggggtggtgaagcacatcctgctggcaancttcaaggaggaggtgacgcaggagcgcctggacgagctcatccgcggatacgccgcgctcgtcggcgtggtcccctccatgaaggccttccactggggaactgatgtgagcatagaaaacatgcatcaagggttcacgcacgtcttcgagt

SEQ ID NO: 1027 - DNA, 253 bp, Zea mays
  misc_feature: Incyte ID No: 700157993H1
gcacaattcaagtgtgccagtttaggtgaccggaagccagttggtcctgaagatgaggtcgcagttatgattatccctgatcatcagatgctggaagctgttgaacgcatcacatctcaactctctgatgatcctataagacctcttgtcatgtggaacccacggcttgttagtggagatgttggagtaggctttaatgtacggaatctgcggagaaatttcttaagcacttttaccactgtttactcgatga

SEQ ID NO: 1028 - DNA, 252 bp, Zea mays
  misc_feature: Incyte ID No: 700157994H1
  unsure 136, 138: a, t, c, g, or other
cggagtgcatgtccgctatcgccggctcgtacggctacattgctcctgagtacgcctacacgctgaaggtggacgagaagagcgatgtgtacagcttcggcgtggtgctgctggagctcatcgccgggcgcaagcntncggggagttcggcgacggcgtggacatcgtgcactgggtgcggacggtgaccgggtcgagcaaggagggcgtgatgaagatcgccgacccacggctctcgacggtgcctctgta

SEQ ID NO: 1029 - DNA, 260 bp, Zea mays
  misc_feature: Incyte ID No: 700158002H1
  unsure 169: a, t, c, g, or other
gaagagggttggacttacgggattcaactgccggtgtgggaacttgtactgcgcactccaccgctactccgacaagcacgactgcaagttcgactaccggactgctgccagggacgccattgccaaggctaatccggtggtgaaggcagacaagctcgacaagatctanggggggttccctacggttgggtatcaggaagattgtaaaccgcggtaactcgtcatgcggaactgctgccttgccccccgggccttttctt

SEQ ID NO: 1030 - DNA, 259 bp, Zea mays
  misc_feature: Incyte ID No: 700158004H1
  unsure 29, 33, 124, 160, 167-168, 208, 244, 249, 253, 256: a, t, c, g, or other
ctcactactacatacatcaccaactaggntcgntctctcgacagcaaatagctagcaatggagaagtacaccaaagccctagcgtcattgctcagcatgctggtgctggcacctctcctcgccntggccaccgacccagaccccctgcaggacttctgcntcgccgnnctcaacggcaagctgtcagtgaacgggtacccatgccagncgccgtcgtcggccggcgaccagttctcttctcgancaagntcgncanggg

SEQ ID NO: 1031 - DNA, 256 bp, Zea mays
  misc_feature: Incyte ID No: 700158006H1
  unsure 84, 189: a, t, c, g, or other
cgatgaccctgacggccttgggtcttggactagcactcctcgctgcggccagcccgtgcttggggttggggagcagcggcaggncagcgacggcgcgtccgtgcctagcgtcgtcaccgaggcgttcttcgacggcatcaggtcccacgcacgggacggatgcgagggcaagaatttctacacgcggangcgttcgtgagcaccgccggggtgtcccgggcttcgcgcacggcggcacggaggcggagggcaagca

SEQ ID NO: 1032 - DNA, 263 bp, Zea mays
  misc_feature: Incyte ID No: 700158008H1
  unsure 150, 262: a, t, c, g, or other
tgacgaggaagaaaccccaactcctaaaaagccagaggcaggcaagaagagaggtgctgaaaatgctctgaaaacgcctctttctgataagaaagcaaaggttgccacaccgccagcccagaaaacaggtggcaagaagggtgccacccntgtggcaactccacacccagcaaaaggcaagacccctgcaaacaatgacaaatcaacggagaagtctccaaaatctggtgggtcagtcccttgcaaatcctgcagcaagacnt

SEQ ID NO: 1033 - DNA, 259 bp, Zea mays
  misc_feature: Incyte ID No: 700158009H1
cgaaacttaatgcaaatgtgcactgaatatttcgcattgggtgagcaaatttgatcactcttttttcctacctacgataggtcgacctccgctagaaaagctgcagtaagttgtccttctgatcatcagctcacttcttttgcctgatgctgtgctcagtaccaatcagtaatcatactggttgcgagtgaacatttcagcagcttcagtttactgactgcatttcccttccgcaggcgaatgtaaagatgacaaagta

SEQ ID NO: 1034 - DNA, 150 bp, Zea mays
  misc_feature: Incyte ID No: 700158010H1
acttgctctagagctacgtttctggcagccgtgttttttcttgtttttacccatgtttagactttgagacctatatctaaggttttggttctcagtgaacaatgaaaattactgtgaaatgcagttgttttggtgcagaaatgcgcactg

SEQ ID NO: 1035 - DNA, 260 bp, Zea mays
  misc_feature: Incyte ID No: 700158011H1
  unsure 49, 53, 235: a, t, c, g, or other
caagatcctgtggcgcaccatccgcgggatgattccgcacaagaccaanatgngggaggcggctctggcgaggctcaagacgtacgatggcgtaccgccgccgtacgacaagactaagcgcctggtcatccctgacgctcttaaggttctgaggctgcaaccaggacacaagtactgcctccttggggagctttctaaggaggtcggatggaactaccatgacaccatcaggganttgaggagaagaggaaggagaaggc

SEQ ID NO: 1036 - DNA, 262 bp, Zea mays
  misc_feature: Incyte ID No: 700158013H1
ctgtgtcggccgaccccatctcgctgccgctcttcatccactccgtgcggccctacggcgacatcttcgtggtggacatcgacccagaggacgcgagcaagaacaaggacgtgaagaagttccaccgggtcacgcacagccgctacgagtactcgacgccgacgtggacggtgtttgccacggatgatcccaacgcgcagtggaacatgctggtgaagaaagactcgtacacgccggcgtgcccctacgcgtacccggacgg

SEQ ID NO: 1037 - DNA, 262 bp, Zea mays
  misc_feature: Incyte ID No: 700158014H1
gcaagcgcctcgccctcgcgctcaagaaggaatttgatacggcatatggtccagcttggcattgcattgttggaacaagctttggttcctatgtcactcactctctgggcggtttcttgtacttctccgtcgacaaggcctatattctcctcttcagaaccgctgtcgagccattagcccatccgcgatgaggggccatgaaacagtctactagctagcgcattctgtattcgacatttaactgtagaagggtaaggagagt

SEQ ID NO: 1038 - DNA, 162 bp, Zea mays
  misc_feature: Incyte ID No: 700158015H1
ctcaaactatattgcactttccaagactcacatgttgtggattgccagttctgtttactgtgatttgagttgtggtgattgcatttgcatttacttggccatattagtaccttcagtttgttggatgaatacatgatgccatgtgaatattgccatttgtgc

SEQ ID NO: 1039 - DNA, 268 bp, Zea mays
  misc_feature: Incyte ID No: 700158016H1
gtttgtgatgaccacagccaccaagttcaccacaccatagccagaacattctagggagttgctggcctgtatgaagcttgttccgtaatcatctcagagctcctagcagaaggagtgtaaattaaagatgaagtggtcgtggaagaggagtttgctccagtgcctgttcatcaagtggatggagctatctaactggttattgggtagaagatctagaacctcttcattgcaataaggtgatgagaagtactcgatctgttcgtgaggc

SEQ ID NO: 1040 - DNA, 256 bp, Zea mays
  misc_feature: Incyte ID No: 700158018H1
  unsure 31, 37, 91, 137, 230, 243, 246, 248: a, t, c, g, or other
aggagatatggatcggtcgtatctccccgtngcggcngcggccgtgcgccctggtcctcgtgtgctgctccggcctctgccgcggcgagcngcttcggggcgagggagtgcgaggacctggggttcaccggcctcgntctctgctccgactgcaacgcgctctccgagttcgtcaaggaccaagagctggtggaggattgccataaatgttgcaccgaggattcagatgnttctatcagcaantcncnttttctgg

SEQ ID NO: 1041 - DNA, 253 bp, Zea mays
  misc_feature: Incyte ID No: 700158019H1
  unsure 130-131, 165: a, t, c, g, or other
ctcatccgtacccgagcactgcacagcacagcacagcacagcacaccacctttagtatatagcaatagcacactcggcccccctcctcttcaactcccccggccgtcctgctcgccggcttctggctggnncctgcatccgcccagtgtgtgtgacctcagggantcgattcgttcatccaagtgaaggcaaccagatccaggatggagttcaaagccgggttttcaccgtggcaatgctagccatcgtcgtg

SEQ ID NO: 1042 - DNA, 254 bp, Zea mays
  misc_feature: Incyte ID No: 700158020H1
gtcaagtgtgaacaatgtgtttgtgacactagaacagtcatcatctactgctatagttataggccttgtttggtacagcttattttcagcttcttcacaaatttaagcagaagttctgccaaacagttagcttctgcagcagcttatcagttcagctgcttctcagaatacactaaaagcagccaataagcagaagctgcttttcaccagcttctcagataagctgctttttcaacaagcaccagctatgccaa

SEQ ID NO: 1043 - DNA, 252 bp, Zea mays
  misc_feature: Incyte ID No: 700158021H1
  unsure 21, 24, 49, 123, 142-143, 170, 206, 211, 223, 227, 245: a, t, c, g, or other
cacctcgcttcactagaggantantctagcagcttctgttgcctccaanttgtccggagaaatgagttgaagcagtgtgagagggccctgagacgatggcgaacctgttcctcaagcaggcanagcagtacgtggcgacgcnnccggtctacccgccggagctcttcganttcatcgcctccaagacccctcgccgctacatggcntgggntgtcggcaccgncaanggccaggccggagcgtcntgctaat

SEQ ID NO: 1044 - DNA, 254 bp, Zea mays
  misc_feature: Incyte ID No: 700158022H1
  unsure 147-170, 175: a, t, c, g, or other
tcgaccgacgccaacgacagagaagagagtccatctgctcgttgccttgattttgtggaacgaagcgatggctcgcagcggcgccatggtttcctgcatgctgctcctggtggtggcggcgcaactgctcatggtggtgatggccannnnnnnnnnnnnnnnnnnnnnnngcgancaacgcggacagcacgccggctgctgtagcaggtgacctgccactacagcgcctgtaactgccgcacttgcccgacata

SEQ ID NO: 1045 - DNA, 83 bp, Zea mays
  misc_feature: Incyte ID No: 700158023H1
  unsure 38: a, t, c, g, or other
tataaattgttttcatgtacatgagcttcgttagaagnatgaaacagttgcatgttgcctatatagagaaaattgcttttgcc

SEQ ID NO: 1046 - DNA, 150 bp, Zea mays
  misc_feature: Incyte ID No: 700158024H1
  unsure 20: a, t, c, g, or other
ggcaaagtgagtcatcagcnagacgtgcctcagtcaatttttacttgctggacatacgcatgcttcggcataatgtaagcagtcagcgcctgtgaaacgtcattgcgcttggggtatttgactcccttttgttttaaacgctgctgatgt

SEQ ID NO: 1047 - DNA, 254 bp, Zea mays
  misc_feature: Incyte ID No: 700158025H1
  unsure 128: a, t, c, g, or other
ggcacggtgaagttcatcgccggcgacatgttcgagtctatcccggctgcagattgtgtcttgcttaagtatgttctgcattgctgggacgacgaaagcagcgtcaagatcctccggcagtgcaaganagcgatccctgcaagagacgccggagggaaagtggtgatcatgaacatggtggtcgggtacggttcgtcagataggtttgtcaaagagacgcaggtgatgtgcgacatgtggatgatgcggtactt

SEQ ID NO: 1048 - DNA, 256 bp, Zea mays
  misc_feature: Incyte ID No: 700158027H1
ccttattctgcaatcactgttgaactcaggatcaatgatgacgaggtggagcaatggattgtgaaggcaattgcatccaagatattggattgcaaggttgaccagcttaaccagactgtcattgtcagtcggcacacagagaggatctttgggatggaacattggcatgctctgcgcacaaagctcggagcttggaggggaaacattgccagagctatcaacacaatacaagctaacaaagtcaccgaagaggggg

SEQ ID NO: 1049 - DNA, 256 bp, Zea mays
  misc_feature: Incyte ID No: 700158029H1
  unsure 7: a, t, c, g, or other
caaggtnccaagcaatcgtcaagaagtatgacattcttttcatagcagatgaggtgatcactgcatttggaaggctgggaactatgtttggatgcgattactataacatcaagccagatctagtttcactggccaaggctctttcaaacgcctacgtacccatcggggcaactcttgttagcccagagatatcagatgtgatccattcccagagcaataagcttggttcattgctcatggattcacgtactccggc

SEQ ID NO: 1050 - DNA, 180 bp, Zea mays
  misc_feature: Incyte ID No: 700158030H1
gccacggtgaggtcggttgggtcgtccgccggatttggctggagaaacacacaggtgggttgtaactttggactcccatatttattgctgctacttactgcttctgtgctgtggttgattagtcggtatgtaaaaggagatttgttatatatttgtaattgtataactgtgaaatatttc

SEQ ID NO: 1051 - DNA, 262 bp, Zea mays
  misc_feature: Incyte ID No: 700158032H1
  unsure 252: a, t, c, g, or other
aagaagagttggtaggcttcttcaatgatcatgtcaaggtcaatgcaccacaaaagaagattcttagtatacaagtgtacggtggtctccattctgccgagtacgaaaccatagtgcaaaatgctccgccaccgccgtcgtgtgagataactgatatttatggcttcaggaggtcgaggcctttatatggatcattcaggggaggcgttggtcagatgaagctatagttcaacattttctcatcatctgtanaattctgaaa

SEQ ID NO: 1052 - DNA, 248 bp, Zea mays
  misc_feature: Incyte ID No: 700158034H1
agtttttatcacaattcacccgatgaaatggggaggcactttaatgaactccttcctgtttaatgttgggctcatactactttgctccatcagtgtgattcagttctgtgccacggcttttgcctactacgcacaagcaactgcagctcaagagatatttggccacactttgcaatcccttcgtggaattaagtatctttacaagtacaatgttttccagtatggctttgttgctcttgccatcctca

SEQ ID NO: 1053 - DNA, 246 bp, Zea mays
  misc_feature: Incyte ID No: 700158036H1
  unsure 243: a, t, c, g, or other
caaaaatacacgacaacaactggatgatatacgatctaaacttctggataatctttcaaaacttcgacatgctcctagtgtccactttcaagagagagttcctgacacagaaatacctgagcaagatgaagaccaagatgatccagatgaacgacatgatcctgactctgatatggaagtggatgatcacaaggctgtggaagagtcatcgaggaggagcttctaggtataaaaatccagagngat

SEQ ID NO: 1054 - DNA, 249 bp, Zea mays
  misc_feature: Incyte ID No: 700158037H1
  unsure 10, 17, 52, 81-82, 84: a, t, c, g, or other
aatgattccntcgacgncgcggagtccccttttcggaataacagatgggaanacatagggtaaatacagcaaagcgagacnngncatgtaggccacagtagtcagtctgttgttccgaaagatgtgtatatatgtattagcagcatgattgttctgattatctttttactgattttcgatggtaggtctattccatcaagtatttaactaatcatttgttgctgttagtataggtcttttgttctttta

SEQ ID NO: 1055 - DNA, 250 bp, Zea mays
  misc_feature: Incyte ID No: 700158040H1
caaggttgtaaagggcacggttgctgttggtttcgacgctgatgccaacggagatgtcactacagtgaagttgaagaatggaagtgttctcgaagctgatattgttattgttggcgtcggcggcaggccattgacgcgtctcttcataggccaagctgctgacgagaaaggtggactcaagaccgatgcattcttcgaaacaagtgtagccggggtatacgcgatcggcgacgtggccaccttccctctg

SEQ ID NO: 1056 - DNA, 249 bp, Zea mays
  misc_feature: Incyte ID No: 700158043H1
tgatgaggccgtcgtcgccaggattgggccttggggcggggttggaaatgctctccatgacatcgcagagaggccgcatcgcctgcacagagtgacgatcttcagcgggacgatcgtaaactcgctggagtatctgtacagcgatggcgacgggcagcagcacaccaccggtccgtggggcggctgcggaggaatggtcgaaagattcatcttgcccctgaagagttcatagtggaagttactgggaca

SEQ ID NO: 1057 - DNA, 248 bp, Zea mays
  misc_feature: Incyte ID No: 700158045H1
  unsure 70-101, 106, 223: a, t, c, g, or other
gcgagaattaggggcaaaggatcagctattggagttgggcgtggacgtgcagttgcaatgcgtgctcggnnnnnnnnnnnnnnnnnnnnnnnnnnnnnnnngcgangcagcgcgcctcctgtgaggaggtagattttatggtgtcatgcggcttttcttgtctggctgaggatgttgcagtctgatgttaggacgctgtcttggtagtcaaaactgccgtaangtataattcaacggcttaaggagta

SEQ ID NO: 1058 - DNA, 253 bp, Zea mays
  misc_feature: Incyte ID No: 700158046H1
  unsure 17, 49, 60, 72, 87, 116, 152, 199, 204, 208, 230, 246: a, t, c, g, or other
ggctcctcgccgtggantcagcagcgccatgagcagggagcagccggcnccggcacagcngcggttcatcgncatcccctccttctnctcctccggctgccgctcccactccagcntcgacgttgtcgacaccgcgcgccacgccggcaacngcaagaagccccacccgcaaggaacggtgccaggcggcgcgtcggcnggggncaanggggagtcgctggtggcgcggntcgtgcgcggtttcangaactgt

SEQ ID NO: 1059 - DNA, 51 bp, Zea mays
  misc_feature: Incyte ID No: 700158047H1
  unsure 28: a, t, c, g, or other
gttttagcagtccagcgttccccttacnaaatatggcgtgctttgttgact

SEQ ID NO: 1060 - DNA, 258 bp, Zea mays
  misc_feature: Incyte ID No: 700158048H1
  unsure 2, 28, 101, 103: a, t, c, g, or other
ancggctgaagcgctgggctccagctantgctgctcgcctgcttcgggacggccgattgggtgccggtttgccaaggacatggaggatgcgagcggcagtntncgtctccagccgtcctacggaacaagtattgggtcctccgccacggccgcagcgtccccaacgagcgcggtctcatcgtctcatctctggagaacggcacgaagccggagttcgggctggccccgcagggttcgagcaggcgcgcgcggccggcg

SEQ ID NO: 1061 - DNA, 253 bp, Zea mays
  misc_feature: Incyte ID No: 700158049H1
gttcccgctcgtgcaccgcaaggtcaggccgccgaccaggaagctgaggaccacgttcaaggcttcgaggcccaacctgttcatgtgatttagctgtggtcagtgtatgcgatcataagagtcacaagtgtttctgtttttttttaagttttgacttcctaatagtaatacttaatcggtttgatgattcaactcgttttgaagcgagcttggtgaaccaatcgacgtgttgcgggttgttcgctctcggcat

SEQ ID NO: 1062 - DNA, 70 bp, Zea mays
  misc_feature: Incyte ID No: 700158050H1
atcatcgtggtgctatactcctatgttactgtgctggcatggaaataaaatgaagagtgcatttctgttc

SEQ ID NO: 1063 - DNA, 264 bp, Zea mays
  misc_feature: Incyte ID No: 700158052H1
  unsure 9, 13: a, t, c, g, or other
atcgcgcantggnagttcttctacgaagaggcgccggaaaccatgaagagcacgtgcacgtcgctcgcgctgctcaccatcgccctgggcagctacctcagctccttcatctacgctatcgtggcagcattcacggccacggcggacagtcccggatggatctccgacaacctcaaccagggccatctcgactacttcttctggaccatggccgccatttcaacgctcaacttcgtcgtgtacagcgtgttcgccaggaactac

SEQ ID NO: 1064 - DNA, 264 bp, Zea mays
  misc_feature: Incyte ID No: 700158053H1
ccttctcggcccgcctcaagaccttcgcccacggcacgcagaccctcactaaacttcgctttacaaggaatgattttactgaggatgataaagcggcgttcaaaaaagtgcttcaggaagatggcttttatacaattaggctgccatctaatgtgttggacactacaaagaaacatcatgttgtttcttcaatcagagctagatgcattccacgtgacagtttggatgaacacattgttatccacatggatggtgtaaatattt

SEQ ID NO: 1065 - DNA, 260 bp, Zea mays
  misc_feature: Incyte ID No: 700158054H1
ctctacgttgcaattctaattgatatcctgccaagtattcttcgagaggtccattcaaaaaaaagtattcttctaggcttgtgcacttctgtcactgttttgtaccccgtgtttaatttctgggcggtatgatatcaagagtacccagatgtatccgtcgttgctggtctaaacactaatagggtgtttggtctgaggaatgggctagtccattctcttctcgctcttttttttatttggtttattaaatagaatgagtt

SEQ ID NO: 1066 - DNA, 262 bp, Zea mays
  misc_feature: Incyte ID No: 700158055H1
ggcgctcatcgtctccacggtggctgggatggcctacttcatcgccgccgacaagaagatcctgtcgctggcgaggcgccactcgttcgagcaagcccctgaccacctcaagaacacctccttccagggcaccggccgtccccacccggctttcttcaggccgtgagacgtggccttcgtccagagctagctacctacctctttcagttcgatcgtcgtcagtgcaaagcaccaccaatgcctgaataaatttaactacgag

SEQ ID NO: 1067 - DNA, 258 bp, Zea mays
  misc_feature: Incyte ID No: 700158056H1
  unsure 17, 34, 37, 45, 48, 95, 136, 158, 162, 169, 206, 223, 230, 238: a, t, c, g, or other
gcttgctgcactgcacnaccctgccctgccatcntancgtacgtnagnccggccgagcgagagcagggagaggcatggctgctccgaagctcgcnacgctggcgctggccgtgctcctggcggcgaccgtagtggntcccccggccgcggtgcgcgcncgangtcgtgntccaccgtgtacagcacgctgatgccgtgcctgccgntcgtccagatgggcggngccatgncgccccancatgctgcagcggcatccgc

SEQ ID NO: 1068 - DNA, 260 bp, Zea mays
  misc_feature: Incyte ID No: 700158058H1
aagtcccacagttcttccatgatgacagtgcccaagttcgttccacgccttacaaaagaagaaactcgggtgtttgaatctgccagagaatcgatgactggtttcaagaaatggcgagcaggtgggatgagactgcaaaaggcttccattcttggccggaagaggaagacaaagctgcctgaatgagttttaaggtgatgtgcgctgctttgatttgctagcaccgtgagcaaagagaaaagtgaatggcagattaaatc

SEQ ID NO: 1069 - DNA, 260 bp, Zea mays
  misc_feature: Incyte ID No: 700158060H1
  unsure 28: a, t, c, g, or other
cgccacccggcagtcgctgatgcccgtngcgctcgtcaccaacgccggcgtgcacgtcgtgatgtactcctactacctctcctgcagcgtcggcctgcgctggcccgggcggtggaagcgcgccgtcacggagctgcagatcgcgcagttcctcttcagcttcgcggcctccgtggtgatgctgtggctccacttcgccgctggcggctgcgaggggatggccggctgggtgttcaacgccgtcttcaacgcgtcgtgct

SEQ ID NO: 1070 - DNA, 261 bp, Zea mays
  misc_feature: Incyte ID No: 700158061H1
gaacttttcagtctccatggccttatatgcattggttctcttctaccacttgtttgctaaagagctggcacctcacaagcctcttgcaaagttcttgtgcatcaaagggattgtcttcttctctttctggcagggttttgcgctcgatgttttaacccaagcaggcgtgatcaaatcccaccatttctggctggacgtggagcacatccaggaggcgatccagaacgtcctggtgatccttgagatggtggtgttctccgt

SEQ ID NO: 1071 - DNA, 263 bp, Zea mays
  misc_feature: Incyte ID No: 700158063H1
agaatttggagaatcttctgccagcaggacccaagatgatgaattatctgcagcagagcagcttggattaatggatatgtcgtcggaatcacagttcctcttcttccagttgccatcctctcttcctttaccgaggcagccacaatcaggtgctgaccctaacgaagtccgcgatgagaaacgtgaggacatgaggccatcatcgcacaatggctcgaaactcaaagaggttcctgaaggctatatggggaaaatgctcgtat

SEQ ID NO: 1072 - DNA, 144 bp, Zea mays
  misc_feature: Incyte ID No: 700158064H1
ctcaaactatattgcactttccaagactcacatgttgtggattgccagttctgtttactgtgatttgagttgtggtgattgcatttgcatttacttggccatattagtaccttcagtttgttggatgaatacatgatgccatgt

SEQ ID NO: 1073 - DNA, 260 bp, Zea mays
  misc_feature: Incyte ID No: 700158065H1
tgatgctgtccctgtcgagggcgatcgggaggcggctcttctcgtccgccgaggccgcgtcgacggctgcggtgaggacggcgcagaacccgctcgaggagttcttcgaggtcgagcggacaccgaggagggcaagcctcctccccactacggtcgcagctggaaggcttctgaactgcgactaaaatcttgggatgaccttcagaaattgtggtatgttcttctaaaggaaaagaacatgctaatgacacagcgtcaaa

SEQ ID NO: 1074 - DNA, 261 bp, Zea mays
  misc_feature: Incyte ID No: 700158066H1
ccagctcgtctatttccgccgcaactgccaagggcagctcccccgacttcaaagcatatgtgaagatcccttacagcgcatgatgtcaaatcggatccgtcatccacatcgtatcgcgtcgttctgcttgtactctgcttcttcctctatgtattaataatcccagcagcttgaaataataacaatgcatgcatgcatccatgatggaaattagaaataatgtttatgtccccaaccacgcctacttatgctctcgagtta

SEQ ID NO: 1075 - DNA, 259 bp, Zea mays
  misc_feature: Incyte ID No: 700158067H1
ccacctccaaggctcttggtgtagcttgccactctcaccaatcaagttttcatgtctgatctcgacattcagatcccaactgccttcgatcccttcgctgaggccaatgctggggactctggtgcggcagagggtcaaaggactacgttcacgtgcgcatccagcagcgtaatggtcgcaagagcctgactaccgtccagggattgaagaaggagttcagctacagcaagatcctcaaagatctcaagaaagagttctg

SEQ ID NO: 1076 - DNA, 257 bp, Zea mays
  misc_feature: Incyte ID No: 700158069H1
  unsure 30, 42, 52-53, 64, 68, 76, 92, 96, 107-108, 116, 122, 126, 141, 153,167, 179, 256: a, t, c, g, or other
ggtttcgtgggtgggcggatcgagatggcngcgtcggatgtngagtaccgcnncttcgtcggcngccncgcctggngccacggacgaccacncccnccacaacgccnncagcaccnacggcnaggncctcgagtccaagancatcctcgatcnggagacgcagaggncccgcggcttcngcttcgtcaccttctccacggaggaggcgatgcggaacccatcgagggcatgaacggcaaggagctggacggccgcna

SEQ ID NO: 1077 - DNA, 256 bp, Zea mays
  misc_feature: Incyte ID No: 700158070H1
  unsure 50: a, t, c, g, or other
ggaacgcattaaggctgttggcaagcatagcatcattggagcaagcgganagttcagcgatttccaggagatcctgcgctatctggatgaactaactctttctgatcatatgtgggatgatggaaattctctgggccccaaagagatccacagttatttgacaagagtgatgtacaacagacgcaacaagtttgatcctctctggaactcactcgtacttggtggagtgaaaaagggtccaaagggtgatgagaat

SEQ ID NO: 1078 - DNA, 242 bp, Zea mays
  misc_feature: Incyte ID No: 700158072H1
gcaatttcttggttgaaatgagatagcggctcctgagaagaggcagcgggttccgtcggcgtataacagattcatcaagtgagctcgctcgatgatcgacgacctcctcagatcagcagcttacgtttggttcattctaccaaataattaaacgctgtgtacgtgtgtgcagggaagagattcgcaggatcaaggcgaacaaccccgacattagccacagggaagccttcagcacagcagcc

SEQ ID NO: 1079 - DNA, 257 bp, Zea mays
  misc_feature: Incyte ID No: 700158075H1
  unsure 47: a, t, c, g, or other
cgcaatgacgggtgaagtaacattaactggaagaatcctcccaattngcggggtgaaagagaagacgattgcggcaaggagaagtgcgataaagacgctcatatttccggcagcgaataaaagggactttgacgagcttgcttctaatgtgaaggaaggactggaagttcattttgttgacacatacagtgaaatatatgatttggctttccagagtgacgccgggactgagatgatttagctttacattacaggat

SEQ ID NO: 1080 - DNA, 260 bp, Zea mays
  misc_feature: Incyte ID No: 700158076H1
  unsure 155: a, t, c, g, or other
gcctcaaccccaaaccaatccgtcgcagacactcaaggtcgcaggatgccgccgccgcgtgagcaaccaccagccccaggacgaagaggacgacgataccgcaggcgttgtcaagctcatcagcgccgagggcttcgaattcgttgttgacaggnaggccgccatggtctccaacaccctccgcaacatgctcacatccccaggcggcttctctgagacgcgccagggcgaggtccgcttcccagagatccccaccaaca

SEQ ID NO: 1081 - DNA, 82 bp, Zea mays
  misc_feature: Incyte ID No: 700158077H1
ccaggttttagtttgtctggccatgcttgggtcgcagcaatctgtgacacgatgaatatcattttgtcaacctattcttctc

SEQ ID NO: 1082 - DNA, 258 bp, Zea mays
  misc_feature: Incyte ID No: 700158078H1
  unsure 26, 83: a, t, c, g, or other
ggcggaccaggtaagcagcagcaggnaccctagcaccgccgcatccgcagccatgggtatcgacctcgttgccggtgggaggnacaagaagaccaagcgcacagcgccgaagtccgacgatgtttatctcaagctccttgtcaagctctaccgtttcttggtcaggaggaccaagagcaacttcaatgctgtcattctcaagaggctcttcatgagcaaaaccaatcgcccaccaatctccatgcgccgccttgtcaa

SEQ ID NO: 1083 - DNA, 181 bp, Zea mays
  misc_feature: Incyte ID No: 700158079H1
aatagcactgtcttcgaagcacctgtaattcgcataggctgatgagtgccaacttttgtgttaaacagatgtagatgtcccttctcactctcccatttggtcgtgtctgattcatttaaacaaacttggtcagacataaaatggtagttagttatccatacactgctacggtttctataaa

SEQ ID NO: 1084 - DNA, 258 bp, Zea mays
  misc_feature: Incyte ID No: 700158080H1
atcagcatagaacttggaaagcaccttctccattgctgattatagttcagtttagaacttggaaagcaccttctccattgctgatgaactgaactataatcagcataaatgaatcaacgaatcgtctagctagctacgtacggatggagttctgagttgtgactccaaatgaaaacccaggttgggttgaaagtattggtgtcaatctgtgagattacttatcacttcagattgaatatatgattttggttttggtaa

SEQ ID NO: 1085 - DNA, 257 bp, Zea mays
  misc_feature: Incyte ID No: 700158081H1
agagagcagaagcgaagagcagcggcgcaaaggaaagggagccatgctcgcctcgccggcgctcgccgcgccccactccttcgcggcgtccgtgtatggaaacatcctcgtcccctcgcctcccgtccccgcgccggcacgtcgcgcggcgctgtccgtcgtcgccaaggtcaaggtggccactccccaggacgaccgcatcgcccgccacgtccgcctccgcaagaaggtaagtggcaccactgagaggccgaggt

SEQ ID NO: 1086 - DNA, 245 bp, Zea mays
  misc_feature: Incyte ID No: 700158082H1
  unsure 49, 51: a, t, c, g, or other
cttcaaggagggcgtgctgtatgccaagaaggactacaacctggcgaanancccgcagatcgatgtgcccaacctccaggtgatcaagctcatgcagagctttaagtccaaggagtatgttagggagaccttctcctggcagtactactactggtatctcaccaacgatggcattgagcacctacgcaactacctgaacctcccgtctgagatcgtgcctgccacgctcaagaagtctgccaagc

SEQ ID NO: 1087 - DNA, 255 bp, Zea mays
  misc_feature: Incyte ID No: 700158083H1
  unsure 138, 186, 238: a, t, c, g, or other
cctaatcatacgaaacaagaggagaggagaggagaccacgtcctccgcggagtgcttggtcgcccgccaccaactccaacaagacagcggtcgacctcgccggccagaaccagcagccatggcgatgccccacacccncccaattccagcttctgctgtggttacctactactagctaagccctcngcgcactcgcccggcgttagttgttgcgtacgtgttcacggctgcactcgcncggcggccacgtacgta

SEQ ID NO: 1088 - DNA, 253 bp, Zea mays
  misc_feature: Incyte ID No: 700158085H1
atcagtatcctgaatatacaggttggccttatccgtaaagcatggaagcatccatctgctgacagccttttagttgaggagatagatttgggagatggtaatgtgcgtcaagttgttagtggtcttgcaaagtattgcagcccagatgatcttactaatcggcatgttgtcttgatcacgaatgtgaagcctggaaagctgcgagatgtaatgtctgctggattggtcctttgtgcttcaactgaagatcatg

SEQ ID NO: 1089 - DNA, 251 bp, Zea mays
  misc_feature: Incyte ID No: 700158086H1
  unsure 23-24, 134: a, t, c, g, or other
tctctctcgtccatcaacccatnnggaaggagcgggagggagcgagccatggtagtcagcacgttcaatggacccgggattgggatcgggttcggtgtcggctgcgggttcggcgtcgggtgggggttcggagnaatgcctcttaacatgttcggcttgggtatcggtgggggttgtggatttggtcttggactaggatggggctttggaaatgcttttggttgtcagtatcgatcttcaagagttcagtt

SEQ ID NO: 1090 - DNA, 253 bp, Zea mays
  misc_feature: Incyte ID No: 700158087H1
ggaacttcgccagttgccagatgataccaacacctacaagactgtcggaaaagtgtttattctggagccaaagtcagttctgttcaatgagcaggagcaaaagcttaatgacagtgagagtgcgatagcttcaatgcagacatccaaagactaccttgagaaacagcagggcgaagtggagaacaatattagggagctgcttcaacaggacccaggacttgcgcgtcagatcctctcaatgaccgttcaatga

SEQ ID NO: 1091 - DNA, 250 bp, Zea mays
  misc_feature: Incyte ID No: 700158090H1
  unsure 157-186: a, t, c, g, or other
gttttgttctcctctcctagctagccagcacctgcagatctgctcgttgccttgggctactgattttgtggaacgaagcgatggctcgcagcggcgccgtggtttcctgcatgctgctcctggtggtggcggcgcaactgctcatggtgatggccannnnnnnnnnnnnnnnnnnnnnnnnnnnnngcgaccaacgcggactggacgccggctgctgtggcaggtgacctgccatacagcaactgtaatt

SEQ ID NO: 1092 - DNA, 255 bp, Zea mays
  misc_feature: Incyte ID No: 700158092H1
  unsure 9-10, 154: a, t, c, g, or other
gcaaggacnncaccgcggacttcgaggacatcggccacagcgcctccgccaaggagctcatgccccagtactgcatcggcaaggtcgacgcggctaccttcccggccaagcccgcctacgtcgtcaccaaggacgacgccaggtcgtccgaganggccgcgacgagcgccggcgcttgggccacgctcctgcagctcgccgcgcccgtcctgctgctggcgctggccttcgcgctgcagcagaactatgccacgg

SEQ ID NO: 1093 - DNA, 253 bp, Zea mays
  misc_feature: Incyte ID No: 700158094H1
  unsure 10: a, t, c, g, or other
cttgcatcanacacattccttgttgggcattcagtgactctcgcggatatcgtgatgacatgcaatctctgtatgggatttagccgtatcttgactaagagttttacctcagagttccctcatgttgagaggtatttctggaccatggttaaccaaccaaacttcaaaaaggtcattggtgacgttaagcaggcagaagctgtgccacttgttccacagaaggctgctccagccaaagtgcagaagcctaagg

SEQ ID NO: 1094 - DNA, 254 bp, Zea mays
  misc_feature: Incyte ID No: 700158095H1
  unsure 83, 169, 180, 192, 207, 214, 245: a, t, c, g, or other
gggcagagaaaggaaacaaagacgggaaggcggaggccgagacggtggagttcgacctcgacgtggacggcgtggcctccgcngcggacgcgaacccggcaaggccatggcgatgccgcccggcatgaccaaggccgacctcggcccgctcctggagaagatgatggcnccgggagccangcagagcgtgtncgtgccgtccatctngcccgcntccgccgggttcgtgtccggctatacggctncaacccggg

SEQ ID NO: 1095 - DNA, 254 bp, Zea mays
  misc_feature: Incyte ID No: 700158096H1
  unsure 12-13, 21, 34, 56, 58, 67-88, 91, 98, 108-109, 128, 192, 213, 216, 218,240, 250: a, t, c, g, or other
ggcggccaaagnngagaaganggtggaggtccangactggcacggcggcgacggcnanccgggtcannnnnnnnnnnnnnnnnnnnnntanccgcacngccggtaggnntgctgcaaccgcgggtacnatggcggctgccggtactgctcacaccctgatcagataccagagcccatgtaccgtcctgagcncgtcgaggtccacaactaganagnanacggtacgtatgccccgatggnaatgaatggngagc

SEQ ID NO: 1096 - DNA, 264 bp, Zea mays
  misc_feature: Incyte ID No: 700158104H1
cacaacaacaacaaccatctccaacgcagcaagcagacagaaggacaggcaggcagcgagtgcaaacaaccgcgagagcgattcagcgatgggctccttcttctcgaccttagtgacgccccctccgcccgccgccgacgacccgaactgcgccgtggtggccgcgcactccaaggccacctacgacgagcagtgggcggcccacaagagcagcagcaagctgatggtgatcgacttctcggcgtcctggtgcgggccctgccg

SEQ ID NO: 1097 - DNA, 261 bp, Zea mays
  misc_feature: Incyte ID No: 700158105H1
  unsure 23, 78: a, t, c, g, or other
gcgcggcctccgtgcagggcgangtcgactcgctcaagacctacgtgccgttcaagacgaggtcgtgagctcctgctncttagttattatacatgtagcatacatactactcgtgcctcctttgtagtggcaccgaaacaaactgagcaaactcagccaaattagttatgcgggagtttaattttgaactactagtatgttgctgtcgaatgcaacaaaactaataacgtttacagtttttctatttggcatcaaccttgt

SEQ ID NO: 1098 - DNA, 258 bp, Zea mays
  misc_feature: Incyte ID No: 700158106H1
  unsure 66-67, 104, 212, 221, 229: a, t, c, g, or other
gcaacgacgcgtgcttggagcggttcctgcggtcgcggggggacagcgtcaagaaggcggcgaacnnctgaggaccgtcctctcatggagggagagcgtcgganctgatcacatcatggccgacgagttctccgccgagctcgccgacgggtggccttcgtctccggacacgacgacgacggccgcccagtcgtggtgtttcgaatcaagcnggactaccncaagttcnatctcagaaatcgttcgtgaggctgctgg

SEQ ID NO: 1099 - DNA, 85 bp, Zea mays
  misc_feature: Incyte ID No: 700158107H1
  unsure 24, 84: a, t, c, g, or other
cttacagaagtcgctacgtgaggnctgttgtaataaggctctattcagttcctcaataatgaagttactttgtgttcaaaaaana

SEQ ID NO: 1100 - DNA, 55 bp, Zea mays
  misc_feature: Incyte ID No: 700158109H1
  unsure 8, 20, 51-53: a, t, c, g, or other
cctaaganaccccaaaatantaaggtgaattagacttcattaattttaaannnga

SEQ ID NO: 1101 - DNA, 250 bp, Zea mays
  misc_feature: Incyte ID No: 700158112H1
  unsure 23, 248: a, t, c, g, or other
gcgctggagtggagttgactaanaccttgttcgtttctgccggattggtgggtcctaacgattcctgaccggattgtttctctaatttatataaactttgattagctggaacgattccgggtgcaatccgacggaaacgaacaaggcctaatgttgtacgtgtactgtggcatggcagaaccgtccggtttaacccaatttcgggcacacctgccagctatttatcactaagtgcaccagagattatntc

SEQ ID NO: 1102 - DNA, 225 bp, Zea mays
  misc_feature: Incyte ID No: 700158113H1
tcttattgttgttatattgctgatacatgtctcgcgtgatagatgtgcaactatatatcagtctcgtcgccggcaacactggcatgcttaaacatgtgtcgctgctgctccgtgatgccggcgacggtgctattagcgttaatgttagtgtcgatcgggtctccttgaacaatggcaggaatctgttgcttgtttactttcttctaatggcaagtaaagttcccc

SEQ ID NO: 1103 - DNA, 94 bp, Zea mays
  misc_feature: Incyte ID No: 700158115H1
gtaaagaggaagacagcaaaatcaagttgcacagcgtatggtgaatatacagtaattttcctcctaaactggtgcgatgcattttgaataattg

SEQ ID NO: 1104 - DNA, 202 bp, Zea mays
  misc_feature: Incyte ID No: 700158116H1
  unsure 195: a, t, c, g, or other
ctgcatctgcagtcacctttggcgtcgctcggcgaatttgagttgcccctccggttaccgcagaacataccgtgcccagaaggtaagctccagtggactctgaaggtgaagatcaggagaaaatgagcgcaggaactggggaagtttcttttgcccccccacaatctggtgtatgtaccaaaccattgttaagcnccgaaaa

SEQ ID NO: 1105 - DNA, 251 bp, Zea mays
  misc_feature: Incyte ID No: 700158119H1
catgatctcatctggtcagccagtgaatgagtacatcgactcagctgtgagacacgtcctcctcagacagggtgttctgggtatcaaggtgaagatcatgcttgactgggacccgaaggcaaggttggcccgatcacccctcttccggacctggtgaccatccataccccgaaggaggaggacgagctgcgccctcctgtcttggcagctgaggtctaaggtcccaacagcgtcctcgaaatggcagtttg

SEQ ID NO: 1106 - DNA, 249 bp, Zea mays
  misc_feature: Incyte ID No: 700158121H1
  unsure 150-172: a, t, c, g, or other
acgctcctttctttctcggaggcgacagtcgaactcgaatccctcatccagcctggcgctggcgtcgccggtcgccgccgctcgattgcctccgcctgaatatcccttgccccataaggcctgaccttgaaagcctcgcctcttgatccnnnnnnnnnnnnnnnnnnnnnnnatgccgaagcggacgacacacacctactcgagcgaggacgcactgccggagggccccgagtccgacttttcgtatat

SEQ ID NO: 1107 - DNA, 252 bp, Zea mays
  misc_feature: Incyte ID No: 700158122H1
  unsure 224: a, t, c, g, or other
cagacagcgcacgcacgccaggaacgcccgagctctccatctctaatccagcgctcaagtagagagcgcagggacatgctcgacgcttcagcgcccagccctctgtaggagcagcgcactcctcttctgaagcacctcgcaaccaagtcttccccgcagccccacaacatcgacgcgccgtgggtgttcgacaaagtgcccgtggaaagtattgcgctgcgcancgcattcgtgacaccgtcgaaacccgtg

SEQ ID NO: 1108 - DNA, 250 bp, Zea mays
  misc_feature: Incyte ID No: 700158123H1
  unsure 28: a, t, c, g, or other
cgactcgacagttctaccgccgcgagtngggaggatgagggagccgtcaccagtaaccttcgtctgtgccccgctcgcctgccaggaaggtgaagacgaattgctgccactggggagcaccagcgcgagggcctgtgcctcatcgcggaaagccggggacggagtcatgcagggacggcgcacgtagacttatcggaagcagcgacggctgggcaatcttcgcagcgaggtcacgtgtcatcagaagagc

SEQ ID NO: 1109 - DNA, 192 bp, Zea mays
  misc_feature: Incyte ID No: 700158125H1
  unsure 2, 4, 11, 42, 66, 72, 79, 82, 89, 91, 118, 129-130, 132, 139, 142, 148,161-162, 177, 186, 188-189: a, t, c, g, or other
cngncggtggncttcccaagccctcttttttccctcgccgcngcgcaggcagagcagaggcactanattgtngccgttngcngcccgcntngcctccttggccgcgctgctgctcgcnctcctgctcgnngngccggcntcngccgcnaacttcacctgcnncacggtgggcaaaangtgccagtngnngat

SEQ ID NO: 1110 - DNA, 252 bp, Zea mays
  misc_feature: Incyte ID No: 700158126H1
ctggaaggtttagcactctatgctgaccctgattttaaggtgcttgctgcatcatatccttactttgcgaaaaggctactgactgatcccaacccatatctcagagatgctttaattgagcttgtattcaaggatggaaaattcagatggaataggcttgaaaatcttcttgttcaagggcgccaagatagggagtttgcagccaaagatgcactgcagcctgttctaaagcttctccttggtcctggtggg

SEQ ID NO: 1111 - DNA, 255 bp, Zea mays
  misc_feature: Incyte ID No: 700158129H1
  unsure 3, 48, 102, 215: a, t, c, g, or other
gangctctcctggggcgcttgttcactctagacagcctgaagacgtcnaccggggcatcggaatgcttgaagctttcattggacaggtctagcagcccagangaaacaagggagaagctctacttgttagctgttggtcgttacagaactggggattatacaagaagccgacagcttttggaaagatgcttagagatccaacatgactggagacnagccataactttgcaaaggctcgttgaagaaaaaaccaaa

SEQ ID NO: 1112 - DNA, 250 bp, Zea mays
  misc_feature: Incyte ID No: 700158131H1
agagaagcctaaacagctcacaatcttctatggcgggaaggtgctggtgtttgacgatttccctgccgacaaggcaaaggacctaatgcagctggcgagcaagggcagccctgtggtacagaacgttgttttgcctcaaccctctgcacctgctgctgctgtcaccgacaaggccgtgccgtccccgtcatcagttgctgctgcttcaggtgatgtaaagaagctaatcgaacaaatgctctgatatgcc

SEQ ID NO: 1113 - DNA, 248 bp, Zea mays
  misc_feature: Incyte ID No: 700158133H1
gtttgctgaacaaggtgaaaccttaccaggagagggaacagttccagagatcaacagcggcaacgagattacgcctcaaagcacgcaacctccgccaacagcccctgcgcaagtacaaattctaaggtggaagaagcaagcaccgatcatcagtcagattggcctatgccagatgccactggaaacatcggtgttgggccatctggttttggacatctgacagtgcaggttgatgaagatgaggacta

SEQ ID NO: 1114 - DNA, 104 bp, Zea mays
  misc_feature: Incyte ID No: 700158134H1
gccgaatggtttattatttgagtatattttttcttttttaagccattctatcctatatagaatcaatctaaacaacaaattgggagcagcgttctattgtaaaa

SEQ ID NO: 1115 - DNA, 246 bp, Zea mays
  misc_feature: Incyte ID No: 700158135H1
  unsure 50-51, 60, 110, 203: a, t, c, g, or other
tctctctctccttagacctatcttatttcagtagagagagatgtcaatcnnccagctganaagggttcaagcagggattacaattctcctggtccagagagcaatgacangataccgaacagcaggaagagcatccgcttgaccccttttcagctggctgattgacatctctctctccttagacctatcttatttcagtagangaatgatggcgacaaaagccatccatccatatggcgaaccgga

SEQ ID NO: 1116 - DNA, 245 bp, Zea mays
  misc_feature: Incyte ID No: 700158137H1
  unsure 23, 194, 209, 217, 221, 226-227, 235, 240: a, t, c, g, or other
ggcaaggtggtgctgtgcgaganccgctccatcagcgagcacgtcgagcaggggcagacggtggccgcgtacggcggcgccggcatggtcctgatgaacaaggcggcggaggggtacaccaccttcgccgacgcgcacgtgctggccgcgtcgcacgtgagccacgccgcggggtcgaggatcgcggcgtacgnaggtcggcgcccagncccacggngtcnatcgnnttccgggncacgntgatg

SEQ ID NO: 1117 - DNA, 247 bp, Zea mays
  misc_feature: Incyte ID No: 700158140H1
gaggttcaccgtcgcagtagattccttcattaaaactggtcacattccctccttgaaggaaggaaactcacaggagacgatatttaatccaccttggcggcacgagacagtcgccataggttcaaggtttggagaagcatttcaagagccagcttcatttcttgccataagacccctgtttgaggacgagagatacatggtaacatataacccgacaaaggataaagtgtatgctttgctcaaggac

SEQ ID NO: 1118 - DNA, 247 bp, Zea mays
  misc_feature: Incyte ID No: 700158142H1
gaccaaggtggcggaggcgaggcactgcctgtcgcagagccaccggttcaagggcctgtgcatgagcagcaacaactgcgccaacgtgtgccagaccgagaacttccccggcggcgagtgcaaggcggagggcgccacgcgcaagtgcttctgcaagaagatatgctagtagtagcctaggctttgcttgctggcacaagcaggtcgtcggcacgcaacgcaattcaagcatatcggtcctcctccc

SEQ ID NO: 1119 - DNA, 246 bp, Zea mays
  misc_feature: Incyte ID No: 700158143H1
  unsure 53, 61, 231, 241: a, t, c, g, or other
ggactgtttgggacagctgctgcttgttgaaaaagcagcttatctgataagcnggtaaaangcagcttctgcttgttggctgcttttagttcattttgagaagcagctgaactgataagctgctgcagaagctgcctgtttgtgtaacaccctaaatctagcaaatgcaaacaaccctatttgaattattaaatttcagtagaaaggaaaaataattatgtttcaaataangaaaccttgntattt

SEQ ID NO: 1120 - DNA, 247 bp, Zea mays
  misc_feature: Incyte ID No: 700158144H1
  unsure 54, 58, 62, 100, 105, 117, 127, 132, 135, 144, 162, 179, 182, 193-194,234, 242: a, t, c, g, or other
ggtggccgggcctcgcccggagacgggcctcgagaagctccgcaaggccaccancgcncgcncgctcgtcatcaacaaagacgcggacggcggcagctanaagcnggcgcagtcgangccgtcgatnccgangangccggtgangccgtcgtcgtcgacgangccgcgtcggcgccggnaangtgtggcgcanntcttccacccggggagcaacctggccaccaagggcatggncgccaacncttcg

SEQ ID NO: 1121 - DNA, 247 bp, Zea mays
  misc_feature: Incyte ID No: 700158145H1
cacagacgagacgacagagatgaaggacggaacgtcgtcggggggaggggcgttcgctgcgggcagcgatccaaggcagccgtcgacggcgaacattacgcgccgccgaagctgtcgccccaggacctacccatcgactatgcaggcttcctcgccgtcgccttcggcgtcctcggcgtcatgctccgctacaaggtgtgctcgtggatcgcaatcatcttctgcgctcagtcgttggcaaacatga

SEQ ID NO: 1122 - DNA, 249 bp, Zea mays
  misc_feature: Incyte ID No: 700158147H1
attgagttggattcttagagaggattttagtttccaaactagccctcaatcctatggattctaggagaggattcgagtttccaaactagctctggtaatccaagggatctagtcagattttcggagaggatttgggtttggaaactagccctcaatcccatggattctgggagatgattggagttaaaaatctagctcttacatgatttattacctgcatttgttctttacatgctacagtctagagta

SEQ ID NO: 1123 - DNA, 56 bp, Zea mays
  misc_feature: Incyte ID No: 700158151H1
  unsure 10, 34-35, 40, 42, 54: a, t, c, g, or other
cgtccccgcngctgccgccaatgccgccgcctcnnccggnantgtcggcaaganga

SEQ ID NO: 1124 - DNA, 273 bp, Zea mays
  misc_feature: Incyte ID No: 700158152H1
  unsure 171: a, t, c, g, or other
atctcgtcgtacagagccgaaagctggagcttccaatggcgggagacaacgacctgaaggtgctcggcgtgtggacgagcccgttcgtgatccgggtccgcatcgtgctcaacctgaagggcctggcgtacgagtacgtggaggaggacctcagcaacaagagcgcgctcntcctggggtccaacccggtgcacaagagcgtgccggtgctcctccacgccgggcgcgccataaacgagtcccaggtcatcctgcagtacatcgacgaggtgt

SEQ ID NO: 1125 - DNA, 274 bp, Zea mays
  misc_feature: Incyte ID No: 700158153H1
ggctcctatctggtataggacggagctgagcttctagcaacgtacagtgtatccgccatgagtcctttcggggcggtgatcacgccagaaaccctcaagtacatgtccaagtaccagggacgtgagatcacgcaggtggactgcgcacgggaggcgatgaggctgatccacgcggaagacaagaacctcaaggccgaggactcagcgtgggagctgaagaagaagttcggcaacggcgtgagcaccatggtcctcgtctacaacgccaccgggg

SEQ ID NO: 1126 - DNA, 272 bp, Zea mays
  misc_feature: Incyte ID No: 700158154H1
ctggtaataagcggcgataagatctcacgacttggggccatatgttggatgcagatttgattcagtcggcacttccacatgcatgtgtcatctgttcgtttctcaataaattctgcgtcatttgctgctgattgtacttgacaagtagagacatggattgactcttaaaattccatccatgtgttaaatgacatattcgagacatccttttctcaataaactctgcatcatttggtgaattgcacttgagaagtaaagacatggagccttaa

SEQ ID NO: 1127 - DNA, 271 bp, Zea mays
  misc_feature: Incyte ID No: 700158155H1
  unsure 15: a, t, c, g, or other
aggaagaggagcttngggaggagatggccggcgccgagggcgagaggtgggtggggctagcaacggacttctcggaggggagccgggcggcgctgcggtgggcggcggccaacctgctgcgagccggcgaccacctgctgctgctgcacgtcatcaaggagcccgactacgagcagagcgaggccatcctctgggaatccaccggctccccgttgattcccctctcggaattctctgaccctatcattgcgaagaaatatggagcaaagcc

SEQ ID NO: 1128 - DNA, 270 bp, Zea mays
  misc_feature: Incyte ID No: 700158158H1
  unsure 2, 9, 17, 23, 29, 32, 34, 37, 41, 44, 53, 84, 88, 105, 119, 147, 154,248: a, t, c, g, or other
cnagatcancagtagcnagctcnggagcngancntgntcanggnagccaagcncatcccggtcctctcccggcgtcttctcccnccgnaccgcggctccggcganggcgggcgtcggcnccgcgctgcgtcggctctacctctccgnctacaantgggtcgtcttcttcggatgggcgcaggtgctgtactacgcggtcctgacgtgcgtttgagcgggcacaaggccgtctacgccgccgtcgagangccgctgcagttcgcgcagaca

SEQ ID NO: 1129 - DNA, 272 bp, Zea mays
  misc_feature: Incyte ID No: 700158161H1
caaactgaatgttcggttacacgaactgtgaatgtttgagcgaatacctagccgggcattcagtttgagcagccattcagaacttagtttgcccccaattcattttgaaaccacaggtcttgcctgaactgttcaacatcagataacatctcgatcctaagattaaagccatccatttctacactgatcctgtcttctgaccttcctgcgctgtgcttctcaccttactccaggcatggacgaacgaccgtctatatgctccattccaccgg

SEQ ID NO: 1130 - DNA, 274 bp, Zea mays
  misc_feature: Incyte ID No: 700158162H1
gcttgcttccatgccatatgtagaaaatggtgctttgaaggctactcaactgacagagacccactcgcttgaaaatcctttggagtaccaaaaacttttagctgaacatcccaatgattcttcagttgtcaggggtaacaaaataaaaggaaagctgaaggttactcgtgcttttggagttggctatctaaagcagaggaagttcaacgacgcactcatgggcattctgcgagtccgcgatttgagcagccctccatatgtttacacaaatcca

SEQ ID NO: 1131 - DNA, 208 bp, Zea mays
  misc_feature: Incyte ID No: 700158163H1
tgcagatcatttggctcaaataattggtagtccaacggtcacgatacttgttttggtttgggatttctgtggatgcttttgtctagctttatctatgttgtggttgcttttacatgtggttgtagggtaagtttggcaatcaaaaatccctgtagcgaagaactgatatttaaaactgggggcaggtcagaaatcattccgactgttt

SEQ ID NO: 1132 - DNA, 275 bp, Zea mays
  misc_feature: Incyte ID No: 700158164H1
ctttgataatatcactcagttgttcagcttcaactacaaaccacttactccatatggtggtggcataaatgatacggcaatgttctggggtgtaaaattctacaatgatctgctgatgcaagccggcaaacttgggaatgtgcaatcagagctgcttctccgcaaggactcccggactttcactttcgaaaagggatgggccttcccacgccgagtttacttcaatggtgataattgtgtcatgccatctcctgaaaattatccatggctgccga

SEQ ID NO: 1133 - DNA, 271 bp, Zea mays
  misc_feature: Incyte ID No: 700158166H1
caaaaactctcacgatacatctcaatccactccattctctcttattcctagagtacccaaacaaagccttaggtgacaagattaccctcaagcagaagggtggcagttaactgtgacaagtgctgcagttgtatcatcatttttctcttttaggaaatccacgtgccagagataccagtgccgtggcattgaattgagtataaatgtttttttgtacaaaaggatcaaagaaacagataagaggacagttatgaggaagtcacggtgttag

SEQ ID NO: 1134 - DNA, 269 bp, Zea mays
  misc_feature: Incyte ID No: 700158167H1
gttccagaaaggatctgacagcaatatatgaaattctagaaaagacaggctacaaggatgatgagggaactgcaaatgagctctcttttcagatgtggacgaatcagatgcaagatacgttgaactcaaaaaagaagggtgacaatgcttttcgacagaaggattttactgctgccattgattgctattcccagtttattgaagttggtacaatggtttccccaaccatttatgctcgacgttgcctgtcatatctgatgaatggcatg

SEQ ID NO: 1135 - DNA, 267 bp, Zea mays
  misc_feature: Incyte ID No: 700158168H1
taatacaggaattcaaagatggctacaccaaggttcttatatcaactgatgttcttgctcgaggttttgaccaagcacaggttaacctcgtcatcaactacgacatgccaatcaaatttggtacaagagatgaacctgattatgaggtgtacttgcacagaattggcagagctgggcgctttggccggaaaggtgctgtgttcaacttgctgtgtggtcaaaccgataatgttgtgatgaagaagatcgaggactatttccagcaca

SEQ ID NO: 1136 - DNA, 268 bp, Zea mays
  misc_feature: Incyte ID No: 700158169H1
  unsure 7, 75, 95, 126, 220, 222, 225, 233, 235, 241, 244, 267: a, t, c, g, or other
gcaacgncgcgtgcttggagcggttcctgcggtcgcggggggacagcgtcaagaaggcggcgaacaccctgaggnccgtcctctcatggaggganagcgtcggagctgatcacatcatggccgacnagttctcctccgagctcgccgacggcgtggccttcgtctccggacacgacgacgacggccgcccagtcgtggtgtttcgaatcaagcaggactncnccnagttccantntcaganatngttcgtgcggctgctggtgtggng

SEQ ID NO: 1137 - DNA, 267 bp, Zea mays
  misc_feature: Incyte ID No: 700158170H1
gtcgacatgtcgtctccgccgccggtgaagctgatcggcttcttcggcagcccgtacgcgttccgcgcggaggcggcgctgtgcctgaaaggcgtgccgtacgagctgatcctggaggacctgttcggcagcaagagcgagctcctgctccaccacaaccccgtgcacaagaaggtgcccgtgctcctccacggcgacggccgggccatctccgagtccctcgtcatcgccgagtacgtcgacgaggccttcgacgggccgccgctg

SEQ ID NO: 1138 - DNA, 266 bp, Zea mays
  misc_feature: Incyte ID No: 700158172H1
gtgccatgtcgtgttgattctccagaagagtgtgccaaaataatatatgcaaacaagaacctacgtcttggttctgggattcttattgcagtaccgatccccaagcagcatgcaacttcagggaaaattatagagtctgcaatacagacagctctaaaagaggcaggggataaaaggataataggaaatgcgatcactcccttcatgcttgaaagagaatgggaagatccgcgttgtagggttacgctcgcggatggagtagcaca

SEQ ID NO: 1139 - DNA, 266 bp, Zea mays
  misc_feature: Incyte ID No: 700158174H1
  unsure 30, 126-148, 197: a, t, c, g, or other
tcctcctttcctccccaaaagacacaaganggggaagagagagagaggagaggcagagagaagagggggaggcagtccagtgtccacgcaggtacgctccacagaagagagatggcgatgcggatnnnnnnnnnnnnnnnnnnnnnnntggcggtgatgggcgtgctggcgccccgagcggcggcgcagacgcgganactgcgcggagaagctgatcccgtgctcgccgtacatgaacacgacggggacgccgccggatactgtgc

SEQ ID NO: 1140 - DNA, 266 bp, Zea mays
  misc_feature: Incyte ID No: 700158176H1
agcagctgaaggagttcaggaaacactatgaaggttatgtgccaatggaatataaggtttacttgaagaaaatgaaaaggtctggggaatggggtgatcatgtgaccttacaggcagctgcagacaggtttgctgctaaaatatgtctgttgacatcgtttagagacacatgcctagttgagatagtccccagagatgccactccaacaagagagctttggctaagtttctggtgtgaagtacactacaattcattgtatgcagtt

SEQ ID NO: 1141 - DNA, 268 bp, Zea mays
  misc_feature: Incyte ID No: 700158178H1
  unsure 33, 58, 68, 94, 120, 140, 158, 162, 176, 193, 209, 218, 256: a, t, c, g, or other
cgctgtgcggagcaggagctgatcgactgcganacggacgagaacgtgtgccagggcnggctgatggngaacgccttcgagttcatcaagtccntcggcggcatcaccaccgaggccgcntacccgtaccgcgcgtccancggcacctgcgacggctntcgngcccggcgctgggnaggcgtcgtcgtggtgntcgacggccaccaganggtgccggnctgcatcgaggacgcgctggccaaggcggtggcgcacnagccggtgtcct

SEQ ID NO: 1142 - DNA, 267 bp, Zea mays
  misc_feature: Incyte ID No: 700158179H1
cgttttctactaaaccaatggacaatagagagctttacttgaacccttttgacatttaataagataacacgtgtttatacctttaaaattgatttcttctatgactaaaatagtgctaaaaacttatgcataatttattattctaagatcttcagatacaacgccaaaaactttttattatctctcgggtttctgcaggtataataaattgaatgagcttgtacttgaatcttgtgttgctgaatttgttggtaacctggaacaaga

SEQ ID NO: 1143 - DNA, 269 bp, Zea mays
  misc_feature: Incyte ID No: 700158180H1
ggagatgaagaaaaatgctcaagctgcaggagttactgctcattactatgaggatgagactgctcctactggcacatgtgctgtatgtgttgttggtggtgaaaggtcattgattgcaaatctgtcggcggcaaactgttacaaatctgagcatctcaagagaccagagaactgggcactagttgagaaggcaaaatacatctacattgctggatttttccttacggtgtcacctgattctatccagttagttgctgagcatgctgcaa

SEQ ID NO: 1144 - DNA, 265 bp, Zea mays
  misc_feature: Incyte ID No: 700158181H1
ctggaagctctggaagcactgtgaactgaccttggggttgtaggcagaggcgtcaaacgagctagcatcaagccgatctctgccaaacctgttgctaagaaacctgcacttgattcaccatctctccaaggtgacaacagcatcaactctgaggttgtccctgcgacgcagactgatgaatccagctaaagctctacatttgaaacgaacgctttctgacgggggcacggcgataacacgccttctattctagtatgcttagata

SEQ ID NO: 1145 - DNA, 264 bp, Zea mays
  misc_feature: Incyte ID No: 700158182H1
cttaacgccgccgcggagctgctccgcgcccccgacgccggtgattaggagcaggagcaagaggggttcggaatggccaagtctaagaaccacacggcgcataaccagtcgttcaaggcgcacaagaacggcatcaagaagcccaagcgccaccgccagacctccaccaaggggatggaccccaagtttctgaggaacttgaggtactcaaggaagggcaataagaagagttgtgaggctgagtcagaggagtgagatgatgct

SEQ ID NO: 1146 - DNA, 262 bp, Zea mays
  misc_feature: Incyte ID No: 700158184H1
gcggaaacgatctctaaatcgaagggctgaatcgcccaggcgtccacctgacccatcacctaggcgtcgtcctgattctccgcctattcgtcgccgaccagatccttctcctgtcaggcgtggtggcacacctcctcgcaggagaccactgtctccagttagaaggcgttctccttcaccacctaggaggcataggtcaccgatgcgtccttcacctaggaggggacgtggcagtccttcaccacgcaggcgctcccctggg

SEQ ID NO: 1147 - DNA, 196 bp, Zea mays
  misc_feature: Incyte ID No: 700158185H1
  unsure 8, 12, 49, 51, 55, 60-62, 72, 76, 84, 103, 124, 131, 137, 149, 156, 180,189: a, t, c, g, or other
caagatcnttgntccattactgataaaaaaaaatattcggatgcgctananaggnggatnnncatgcaatcngcanttgcagcngcaatcgacgactcgtgcnggagaccaggctcgatcccgntcaagtnggaganctgcccggtgangcccaancacgccaggagcagcagcgccacncggctccgncgtcgtt

SEQ ID NO: 1148 - DNA, 258 bp, Zea mays
  misc_feature: Incyte ID No: 700158186H1
tatcaagattttcttggacccaaaggagaggaacaacactgaatacaagctggagacctgcactgcggtctaccgcagctgtgtgggaaagatgtggtctttgagtaccctatgaccgaaaatgcataaatatgatgccctctggatatctccactctatttcgttgattctgaatgttatgttgggtctccctatgtacttcaaaaaacatagttttgatgctaaagttgcctaggaatttggtacggtgaaaaaaa

SEQ ID NO: 1149 - DNA, 258 bp, Zea mays
  misc_feature: Incyte ID No: 700158187H1
  unsure 194: a, t, c, g, or other
atgtatgctactcttgcaagcagagatgtggactgctgtttgattcctgagtcacccttttatttggaaagggagggtggactatttgagtatatagataggaggttgaaggagaacaatcacatggttattgttgtcgcggagggagcaggacaggatcttattgctcaaagtatacctgctgcagatcagcnagatgcatctggaaataagctgcttcttgatgttggtctctggttgactcacaagattaaggat

SEQ ID NO: 1150 - DNA, 258 bp, Zea mays
  misc_feature: Incyte ID No: 700158188H1
acgccggctaccatccccactaagctcaccgtcaacttcgtcctcccctacaagtccgagatcgccaacaaggaggtggacatggtaattgtaccagctacaactggtcagatgggcgttttgccaggccatgttgccacgattgcagagctcaagcctggtgttctctcagtacatgaggggaacgatgtgaccaagtactttgtgagcagtggatttgctttcgtccatgcaaactccattgctgatattgtggcg

SEQ ID NO: 1151 - DNA, 126 bp, Zea mays
  misc_feature: Incyte ID No: 700158191H1
gttggttgatggatagatggcgattgcgtggtgcggatgtttcggtttggcggtgtcaattctgatatgcgcgtcggtgctgttctgatactgactatatacggaaataaaaatctgatttgcatt

SEQ ID NO: 1152 - DNA, 257 bp, Zea mays
  misc_feature: Incyte ID No: 700158192H1
gatcgacgggcagacggtagttctgtttggcttgctcaacgggacctcgattggccttctgaaccttagtttagggttcaactccatcggattctaccagatgacgaagttggccataatacccttcacggtgctgttggagactatattcctgaagaaaagattcagtgagacgatcaagttttctctgctggtcttgctgctcggagttggcatcgcctcagttacggacctcaagttaaactgcctcgggtccg

SEQ ID NO: 1153 - DNA, 151 bp, Zea mays
  misc_feature: Incyte ID No: 700158194H1
tggggattcaagtttcaaactcactatcgaggggggataggaaggtggtcactcatcggtccacagctagctcgtcgccccccatggctgactggggccccgtggtgatcgcgacggtgctgttcgtgctgctcacgccgggcctgctgtt

SEQ ID NO: 1154 - DNA, 151 bp, Zea mays
  misc_feature: Incyte ID No: 700158201H1
agccgccgccgccgactagccctgcggcgctcgatgtagacttgctgtgctcttgtactctgaaccaccgtgtaataaagctccggattagggtactacaatactgtactatctgtttcagatcccgttcggttagctgtgattaagactg

SEQ ID NO: 1155 - DNA, 259 bp, Zea mays
  misc_feature: Incyte ID No: 700158202H1
ggtggcagcttgctaaaagacagcaggggacacactcaactaaaactatcagtgaagttagtggcactggaagaaagccttacccgcaaaaaggaacaggaaaagcacgacatggaacactgcgcggtgcccagtttcgtggtggtgcaaccatgcatgggcctaaacctcgaagccatgcaatcaagctgcagaagaaagtacggcggctggggcttaagattgccttgtctgctcgaactgctgaggggaagctctt

SEQ ID NO: 1156 - DNA, 145 bp, Zea mays
  misc_feature: Incyte ID No: 700158203H1
  unsure 71, 89, 97, 119-120, 133-134, 137-138, 140-141, 144: a, t, c, g, or other
ccaatttattaatatatgacctttggtataaaaataaaatattttaattgttggtaaatttattataattntttagaaatatatttatntatatttntaatggataacttattaacaanncccaaacacaaannacnnanngang

SEQ ID NO: 1157 - DNA, 144 bp, Zea mays
  misc_feature: Incyte ID No: 700158204H1
acggcgccgtcaagtcggtgatgcagtccgccatcgccagggagaagcgcatgggggcctccatcctccgcctcttcttccacgactgcttcgtccagggctgcgacgcgtcgtgctgctggacgacacgcccagcttccaggg

SEQ ID NO: 1158 - DNA, 133 bp, Zea mays
  misc_feature: Incyte ID No: 700158205H1
  unsure 3, 51-52: a, t, c, g, or other
gtnaagggcacccatcgtcatagatacgattcatagcttctgccactactnntgcgcgaagagccaagaaatgcgtcaggggttgtgaagggaaggagtgccgatggccggtggccacccggcgccgctgcgg

SEQ ID NO: 1159 - DNA, 143 bp, Zea mays
  misc_feature: Incyte ID No: 700158207H1
ctttagaacagttgccatctttgtcaagagttgccaatgttatgttactggtgatgagttccaggtgacggcaacattttagagattttgagtatttctattagttggtactatggtttgccaattataagttacttggccta

SEQ ID NO: 1160 - DNA, 215 bp, Zea mays
  misc_feature: Incyte ID No: 700158208H1
gtgaccaactcgaagcttgcgttcttgtagtagaggtcggcagcaagcggtagagcgagaggtcgagaagatgaagagcagcactctgttggcgatcctagttctccaggcccttctggtctctacggccgtggccaaaggacctgcagggccgaagaagcagtgctggtgcggcgagtgcaccagctggtcgggcgtgtggacctgcgacgacc

SEQ ID NO: 1161 - DNA, 93 bp, Zea mays
  misc_feature: Incyte ID No: 700158211H1
  unsure 14, 39, 48, 54, 57, 63, 68, 75, 85: a, t, c, g, or other
agcacagctagcgnctgctccccttcgcctgtgatcatntctttcagnagcggnaantgcgantgtgnctccagntgctcctgcngcagtcat

SEQ ID NO: 1162 - DNA, 78 bp, Zea mays
  misc_feature: Incyte ID No: 700158218H1
  unsure 6, 18, 38, 44, 54, 56, 65, 68, 73: a, t, c, g, or other
cgccanctcgttcccgcnctccagcggtctccttcgcncagggntacatggcgnangtcgcgcgntanctggnccggc

SEQ ID NO: 1163 - DNA, 83 bp, Zea mays
  misc_feature: Incyte ID No: 700158219H1
  unsure 2, 9, 13, 43, 56-57, 61, 64: a, t, c, g, or other
gngcgatgncgancgtctcgctcatgtccagcttctcctcgcngtcaggaggcgcnnagtngancgcgtgcagcagcgtgccc

SEQ ID NO: 1164 - DNA, 113 bp, Zea mays
  misc_feature: Incyte ID No: 700158222H1
  unsure 2, 6, 26, 30, 89: a, t, c, g, or other
anagcnacaaggcagcagcacaagcnaganccacacctcctcccttcgcctgtgatcatgtcgtcttgctgcggcggcaagtgcgggtncggctccagctgctcctgcggcag

SEQ ID NO: 1165 - DNA, 247 bp, Zea mays
  misc_feature: Incyte ID No: 700158227H1
  unsure 150, 160, 176, 180, 182, 198, 213, 216, 220-221, 232-233: a, t, c, g, or other
agttaatcgcgctcctagattagtttctgaagactgtattgaaagatggcatctctgtcaaatggaggtactcgattgtagcaaggtaccatggccaagctcttcgatcaggaaagcttacaatgtaaatggttgtgggtggccacagcnagaagctgcntacgaatgtaaaatcnatcncntgacagggaaaactcnccagataagggcacngcntgcnnctataggcgcnnctattataggggga

SEQ ID NO: 1166 - DNA, 248 bp, Zea mays
  misc_feature: Incyte ID No: 700158229H1
  unsure 44: a, t, c, g, or other
gcacaagcaagaaccacacctcctcccttcgcctgtgatcatgncgtcttgctgcggcggcaagtgcgggtgcggctccagctgctcctgcggcagggatgcaacggctgcggtatgtaccctgacgtggagaccgccgccaccagcagcgtcaagaccacggtcctcgccgcgccgaccaccaaggccagcgccggcggcttcgaggcggccaccgagggcggcggctgcgactgcaacacctgcaa

SEQ ID NO: 1167 - DNA, 251 bp, Zea mays
  misc_feature: Incyte ID No: 700158231H1
gcgagaagatggccaaccctaacaacggctccgtcaggggattcgaggtcatcgacgccgtcaagtccgccgtcgagaagctgtgccccggcgtcgtctcctgcgccgacatcctcgccatcgccgccagggacagcgtcgtcatcctgggtggtccgacctgggacgtgaaggtcgggcggcgggactccacgacggcgagcttcagggcgccaacaacaacatcccgccgccgacgtcgggcctcgtga

SEQ ID NO: 1168 - DNA, 248 bp, Zea mays
  misc_feature: Incyte ID No: 700158234H1
tgaaattgttgatggagggattgtacttgaaacagaaggaagagagatagctgaaaaggtgtctggtcatggattggagggtgcttcatcagctgagcagactttagtcaacgccctaacgcaagcaagagagcatttggcgaagtctcttctcatgtgatgctatgctttatatattagggtgacgatggagtatctataactgtgtctggatgacacagttttttttggttagcagtggacccaaa

SEQ ID NO: 1169 - DNA, 144 bp, Zea mays
  misc_feature: Incyte ID No: 700158236H1
attgttttcaaaagctggaaatctcattcacagaggaggagatatgtgatctctttgaagcttgcgatataaatgaagatatgggcatgaagttcaacgagttcattgtctttctgtgccttgtctatcttctcaatgaagcag

SEQ ID NO: 1170 - DNA, 131 bp, Zea mays
  misc_feature: Incyte ID No: 700158237H1
ctttcaatggcattgatacagatggaactgtcacaaaggggggttactccactcacattgtagtccatgaaaggtattgcttcaaaatacccgatggctaccctttggcgaaggcagcacctcttctgtgt

SEQ ID NO: 1171 - DNA, 143 bp, Zea mays
  misc_feature: Incyte ID No: 700158238H1
ctcccaacccctacactcccggcggcggcgcaggagcagcagcacccgaggatggtgaagttcctcaagcccggcaaggccgtgatcctcctgcagggccggttcgccggcaggaaggcggtgatcgtgcgcgtgttcgagga

SEQ ID NO: 1172 - DNA, 242 bp, Zea mays
  misc_feature: Incyte ID No: 700158240H1
caacccgtcagcccctctcgtttttcatccgccttcgcctccaaccgcgtgcgctccacgcctcctccaggaaagcgagagcttctgcataagaacaacaaatcaaaagcgtgatcagctcggtgccaacaaaacctcaacaaccaagtttcatgtctgatctcgacgtccagcttccatctgcctttgatccgtttgctgaggcaaatgctgaggactctggtgctggtcctggaacgaag

SEQ ID NO: 1173 - DNA, 242 bp, Zea mays
  misc_feature: Incyte ID No: 700158241H1
atttgagattttgacaaaatgtttgagtgtggctgtacgttctaattctactatcaatatgctactacttcagtttgaccaaatgttttattgtggatataccttctgattcgatctactatcaacctgctactctttagtttcaagttataaagcggttcaggctcttgtaggtgtgtggatagattctaactcttctatttatcttaatcccttgttctaaattataaattattgctctc

SEQ ID NO: 1174 - DNA, 230 bp, Zea mays
  misc_feature: Incyte ID No: 700158244H1
  unsure 224, 229: a, t, c, g, or other
gccgcaagaagaagtgtggtcacagcaaccagctgagggccaagaagaagatcaagaactgaggtgctgctcctagtcagtttcatggacaatgttgggctgtattgctgtgtggttgttgaacggtgtttgtttacccaacatttgggccttctgttatgttttaccttgttgtcgatgacactactatatgacaatagcaactctgttattgtagttttggncctgnc

SEQ ID NO: 1175 - DNA, 244 bp, Zea mays
  misc_feature: Incyte ID No: 700158245H1
aaaggcagcagcacgcctcctcctctttcagcaaacacagctagctagcagcacctgctcccttcgcctgtaatcatggcgtattgctgcgacgacggctgcaactgcccccctgactgcgggtgcccatgcgactgctgcaatttgtaccctgaagtggagaccgccgccgccagcggcatcctcgctgcgccgaccaccaaggccagcgccggcggctgcaacacctgcaatgcggcggcac

SEQ ID NO: 1176 - DNA, 83 bp, Zea mays
  misc_feature: Incyte ID No: 700158246H1
  unsure 2, 33, 47, 66, 69: a, t, c, g, or other
cnttccactttgctagccagcatatacttatcncgtagctagcttantaaatcagcagctggtgcngcnagagtaacagctat

SEQ ID NO: 1177 - DNA, 116 bp, Zea mays
  misc_feature: Incyte ID No: 700158248H1
cacttgcgcggtattgtgcaaatagccaagtactccttacggaagtcgctacgtgaggactgttgtaataaggctctattcagttcctcaataatgaagttactttgtgtttcaaa

SEQ ID NO: 1178 - DNA, 231 bp, Zea mays
  misc_feature: Incyte ID No: 700158249H1
caaggctctaggtttcttttattgaaaatgtgtttttttgagccacagatgcgtccaagaactcgtctgatgttttgaggtttgttaagactgggtgtccgagcctttgtggtttgttaagacagcgatgtgtcatgtatttcagaaattgggatttttatgagatgtacctgcgagagccctgtctgtttcgattttcagatattggttttgatttatgcgatacaaaaa

SEQ ID NO: 1179 - DNA, 177 bp, Zea mays
  misc_feature: Incyte ID No: 700158250H1
  unsure 129: a, t, c, g, or other
attgggtgtgtgaatgatgaggtgctggagttcgacatgcgccattgccaggactcaggaggtgtacagattcgatgtacgcttctgtgtctgaatccaaatgtgttttgtgatgtgaacagtgaatanacagactggttgtgacgagaatgttgggatccggaacgtatctcgaac

SEQ ID NO: 1180 - DNA, 228 bp, Zea mays
  misc_feature: Incyte ID No: 700158252H1
agcaggcagatcagatacatccatccattcgcggaccggaaggtgagcgccgtgaacgaaccatctgccctgctagctgcgatctgtagccttgcgtcgctttcgcgcctagatcgtcacgtcacctatcacgatccgtgcggttctagatctgtggtttttccttcccctggtggtcgaatccttccatccaccagaccaccacgggacctcgtggattccttttgg

SEQ ID NO: 1181 - DNA, 229 bp, Zea mays
  misc_feature: Incyte ID No: 700158254H1
  unsure 2, 6, 23, 33, 46, 61, 65, 69, 85, 96, 104, 109, 113, 126, 133, 143, 147,149, 157, 161, 163-164, 180, 192, 198, 206, 218: a, t, c, g, or other
cnattncccctgtcccgctaggnttcccccganaccctcccccaanaccccagagcggagnagancgcnagatgttcggcttcgngcaccacggcnaccacggncagtncccnccggcgcacggcngcgtgcnccagtccacnttcnanatcttctncaangnntactatgggtactgcntcaccgtccgcnacggcnacgtggtnctggcccccgcnaacccgcgcga

SEQ ID NO: 1182 - DNA, 228 bp, Zea mays
  misc_feature: Incyte ID No: 700158257H1
gaagaagacaaggacgaaggcagcaaggtgactctttcggggctcctcaacttcatcgacgggctgtggtcggcgtgcggcggcgagcgcatcatcgtgttcaccaccaaccacaaggacaagctggacccggcgctgatccggcgcggcaggatggacatgcacatcgagatgtcctactgctgcttccagggcttcaaggtgctcgccaagaactacctgggcgtg

SEQ ID NO: 1183 - DNA, 193 bp, Zea mays
  misc_feature: Incyte ID No: 700158258H1
agcacagctagcgcctgctccccttcgcctgtgatcatgtcttgcagcagcggcaagtgcgactgtggctccagctgctcctgcggcagctcatgcaactgcatgtcccctaacgtggagaccgccgccgccagcagcatcaagaccacggtcctcgccgcgccgaccaccaaggccagcgccggcggcttcg

SEQ ID NO: 1184 - DNA, 229 bp, Zea mays
  misc_feature: Incyte ID No: 700158259H1
caccaaccgtggcaaatatgaagaccctgagtgcattccttcacgcactgaggcttcactgggtggagttccagaacaagttctatgaaggtgatggttacaagttcgccccattctcctttgcgctgattcgtgaggaagaagattgagatcgtcccatgtagccgatgtacaatctttgatggcctttgttcccggaacaaatcattttttcatctgttgtctcgga

SEQ ID NO: 1185 - DNA, 231 bp, Zea mays
  misc_feature: Incyte ID No: 700158261H1
  unsure 6, 58: a, t, c, g, or other
attcanaccgtcgccgccgtcgccgagagagttgtgactcccccagcggcggcctgcnaccacccgttccccagtcgtctcttctctccagaccgcatttgcgcccgtcccgtcccctcccctctccctcggcgaggtccgagagcagagctgcctcgggagggtcgtagtccagtccacccgtccgctgcggcggcggttacgaggcggggaattccggcgcgggttgcc

SEQ ID NO: 1186 - DNA, 224 bp, Zea mays
  misc_feature: Incyte ID No: 700158266H1
  unsure 5, 110: a, t, c, g, or other
gagancacggtcctcttgaggggccccaagaatgcccgtgaggcagtgaggcactttggcaaggctcctggagtgccgcacagccacaccaagccgtatgtgcgctccangggaaggaagttcgagaaggctcgtggcaggaggaacagccgtggattcaaggtttaaaacaaattgtggccctccgtgttgccatcagcatagtgcaaccgttgtgtttgatc

SEQ ID NO: 1187 - DNA, 192 bp, Zea mays
  misc_feature: Incyte ID No: 700158267H1
  unsure 70: a, t, c, g, or other
gattgagatcatctgtaagaattattcccaccgttgcaccatctcttcgccaccactgttttagtcatcngtgcctgatgggcaccctgtttatttcatgtatcatttattgctgtcattgtaataagcgatgggcatgattgtagttgaataagtacaatgtccatgtattcagacaccagtatcgtgctt

SEQ ID NO: 1188 - DNA, 221 bp, Zea mays
  misc_feature: Incyte ID No: 700158273H1
  unsure 118: a, t, c, g, or other
caccggcggcctcgtcgacgccgagggtttcccaaggtccgacatcgacataccgaacgtcctcgcccagcgccggaggttgctgaattgcgaaatgaccacaaggatattacaaacnaaattggtaaaaatcttgaggttttacactcagcaaagttatcaaggaatgaacaatcaacctcaaggagatctgatacaacagatccttcacactttggatc

SEQ ID NO: 1189 - DNA, 223 bp, Zea mays
  misc_feature: Incyte ID No: 700158274H1
  unsure 110: a, t, c, g, or other
gcgtccccgcctcattcgcgcgaccatggacacggacacggacacgacgacgtccaccggctcccgcctccatcccgcggccggacatgtacgctcattggccgcccggngcgccgagagcctcgtcacctgcgtcttcgcgacggtgggcacggtcctcggcgcgatcaccggtggcctcatcggcctggccacggagacgggcgtgctgcgcggcacgggc

SEQ ID NO: 1190 - DNA, 224 bp, Zea mays
  misc_feature: Incyte ID No: 700158277H1
tgttgctctaattgagatcggtgagaacgccttactgagcgccctcccatggagtaaaagaagctccagaacatggaggggcacctcatctcctgatctgggggtggaggtctggagtattctcaaggactggatacacggggcacggatgtttgtggtgagcaagagagataatgctgggatcatactggacagaattgtgaagcaggaggtcgaagcaagag

SEQ ID NO: 1191 - DNA, 227 bp, Zea mays
  misc_feature: Incyte ID No: 700158278H1
  unsure 59, 119, 193, 202, 206: a, t, c, g, or other
catgcactccctgcggtgcgcccttcgctaccccatccccagtaccgccgcctctttanccacctccggcctccgccgtctctcctcccaccatcgcactccaccgccgctccgctcancgaccaccggtgaagacgagtggaacgatcgcgtgggagaccgcatggcttccaggcgactcccccgcctcctncccagcgcncgcngcgccatgggagtctcccgcc

SEQ ID NO: 1192 - DNA, 126 bp, Zea mays
  misc_feature: Incyte ID No: 700158281H1
  unsure 7, 25, 27, 32, 49, 54, 64, 71, 73, 85, 89-90, 98, 121-122: a, t, c, g, or other
gcagctnggccgcctccccgtcgtncngttcnccgcggggggtgtcgcnacgcncgccgacgcngcgctcntnatgcagctcggnggcnncggcgtcntcgtcggctcgggcatcttcaanngcgg

SEQ ID NO: 1193 - DNA, 217 bp, Zea mays
  misc_feature: Incyte ID No: 700158282H1
ccacctcattgctgaaggcgctgcacatcaacacagtattgtgattttgatgggtcatgtgttttcctctcaagttagtgtttacgttttcgctagaggaagaaaaggggcgtccttctctttttgcctccttttctgctgtggtggcttctcacgagcaccagactcatttgttgtacctgatccctccttttttgggagaaaggttcaacgtttt

SEQ ID NO: 1194 - DNA, 216 bp, Zea mays
  misc_feature: Incyte ID No: 700158283H1
gatgaagacagctattgattgttgtgtttgtcgaaccttcctatagtgcattagaatcagaaactttggcttcagttccttcgctatgggccccttgtactgctgcaaatggagttttccattgtagctgataaagtgccgacaaggtgcatccatatgtgcataggtggcactgaatcggggctcactggaccagtttgatattgtagtaatata

SEQ ID NO: 1195 - DNA, 216 bp, Zea mays
  misc_feature: Incyte ID No: 700158285H1
ggcagccagccgcggagggaggaaccctagcggaacaggtgacggcggcgcgctaccggtgacgggggatacggcggcatcgtcccctcctccatccccggcgcggcggcgccagcagccggcctgcaggctgtttgaagagctcgccatttaatctcaatggaagccaagtttttccgtttcctgaagctcgttggggtcggcttcaaagcgagg

SEQ ID NO: 1196 - DNA, 217 bp, Zea mays
  misc_feature: Incyte ID No: 700158286H1
cacaaggccacagaggataaagaaaagcagtttgagaagttgttgcaggaagagcgctcaaaggccagacgctttgatgttgattctggaactatgaaagatcgtcagctaaggaaggaatatgtgcagaagttcattgattgccaagtcaaggatgtggcagagtttgaagttgagcgagatgagctgatcaaagtccacgaggacaagaagttga

SEQ ID NO: 1197 - DNA, 163 bp, Zea mays
  misc_feature: Incyte ID No: 700158287H1
  unsure 28-29, 41, 50, 71, 78, 103, 105, 131, 153, 156-158, 160: a, t, c, g, or other
tacgtcctcctccattaatattggcagnnagctatctaggntcatcagcntctgagcttattattactaantcgatcnggtgccatggcgatgagagtcggcnanctggcgctggctgcggtgctgctgtncgcggcggcggccatggccacngcnnncnggt

SEQ ID NO: 1198 - DNA, 165 bp, Zea mays
  misc_feature: Incyte ID No: 700158289H1
gcaacacatccaagtccatgtcaggctcgtcgagtggccatcctgtgcctgaagctgaatcgctggctgcagaaaacacgggtgaagcatcagcagttgaggttgccaaccatcaagtgcctgaagcgagccgtagagaaagcattccaagagttccttcgtctc

SEQ ID NO: 1199 - DNA, 217 bp, Zea mays
  misc_feature: Incyte ID No: 700158290H1
  unsure 101-120: a, t, c, g, or other
cctcccaccgcacgcaacgcagcctcgacctcgacctcgccgtcgccatggcgagcaagcagacccgccgcctcttcgtccttgccgccgtcgccgtatgnnnnnnnnnnnnnnnnnnnncagcctcctctgtcgccaccgacgtcgattactgcagtaaaaaggagtacccggtgaaggtgagcggggtgcagatcgtgcccgatccggtcgagcc

SEQ ID NO: 1200 - DNA, 218 bp, Zea mays
  misc_feature: Incyte ID No: 700158291H1
agaactgtacattttggtaaaccctcagcacatgagaagtcatgctacacagcagttttgaaaggccacattgcactagacattgctgtgtttcctaatgggacgacaggacatgctcttgatattctttcacgagcaccactctggagagagggtcttgactatcggcatggtacaggccatggaattggatctaattagcttcagaccttctgctc

SEQ ID NO: 1201 - DNA, 219 bp, Zea mays
  misc_feature: Incyte ID No: 700158292H1
tgcaggataaagactgtattgttcctgcaattcctgtgttcttcgttgtttcaaggaagtccacattctataaagacttcaaggctggaaactggtctttgccatgaaacagaaccggacactaaggttcagcttaaattgatctctgagacgggcagcggatatggcaagaaagcagaagatgccctcttgtgatcatggtcctttggtttaaaagga

SEQ ID NO: 1202 - DNA, 219 bp, Zea mays
  misc_feature: Incyte ID No: 700158294H1
tgcatcggttgtgtcgagttgctggtcttagtttattcctttagagttttgagttctaccacgttttggtcaccacgaaatccaccatcaccaaaaacatctctggttcgtttttgccaccacggatacatatcatatccgatttggaagtttaaatacaatctggaaagcttatcttatcttctttccaacggatctgaccttatctcaaaattcgtt

SEQ ID NO: 1203 - DNA, 162 bp, Zea mays
  misc_feature: Incyte ID No: 700158301H1
  unsure 137, 154: a, t, c, g, or other
caatttcccaagctttagaggcccatatatacaccgatgcatcgagaaggcggattctctactcatttggctggccagatttgtccaaaaggctatgttcatgcaatcaaagttcaccacttcatgttctgcccatnggatctataaatcatgngaacttgg

SEQ ID NO: 1204 - DNA, 158 bp, Zea mays
  misc_feature: Incyte ID No: 700158302H1
  unsure 151: a, t, c, g, or other
cccctgctccgccgccgccacggtcgcctctactgccatggtgagcgctgaggtcggcatcgattacgtgctgtggacggaggacgaggtgtccacccgcgttggcgaggttgccgccgagctcgcggccgacctgcgcgcgttgccggancccgccg

SEQ ID NO: 1205 - DNA, 263 bp, Zea mays
  misc_feature: Incyte ID No: 700158305H1
  unsure 16, 35, 44, 61, 70, 82, 167, 196, 211, 241: a, t, c, g, or other
cgtcgtcctccattantattggcagcaagctaggntcatcagcntctgagcttatatattnctacatcgntcggttgccaantggcggggatgacagtcggcaataagctggcgctggctgcggtgctgctgtgcgcggcggcggccatggccacggcgcacaggcntccggcgtgcgcgccacctacaacttctncaacccgcagcagancaactgggacctcaacgccgtgagcgcgtnctgcgcgacgtgggacgccagc

SEQ ID NO: 1206 - DNA, 259 bp, Zea mays
  misc_feature: Incyte ID No: 700158310H1
cacaaattaagtagtggagtgtcagaacttgggaggcacaaattaagtacaaagcagtctaattaatgacgggcccgatggagattccggtgatcgacctcgccgccgccgacctctacgaggacgacgaagaggaggcgctcgagaaggtcgccgacttcttccagtccaagtacttcaagccgggctccgtcgtcaccttccacttcccggcaccggcctccgcctccccgggacccgcggcggagatcaccttcgc

SEQ ID NO: 1207 - DNA, 126 bp, Zea mays
  misc_feature: Incyte ID No: 700158312H1
ccaatgtagcgttccattccatcccatcgatctgttactgctgatgactgggagattaggatgattggtaggcctgtatggagtaagaaggaataatttgtagctgcaatcggatcatcatcatcc

SEQ ID NO: 1208 - DNA, 236 bp, Zea mays
  misc_feature: Incyte ID No: 700158313H1
ggagactttgatgccacaaggaaattcatcgattctgttaagataccctatcatgccccttctttcggaggctgtgagagcataattgatcagcctgctatcatgtcctactgggattcaaaggagcagagggacatctatgggatcaaggacaacctgatcaggttcagcattggagtggaggattttgaggaccttaagaatgatcttgttcaggccctcgagaagatataagc

SEQ ID NO: 1209 - DNA, 235 bp, Zea mays
  misc_feature: Incyte ID No: 700158314H1
  unsure 224: a, t, c, g, or other
ctattaccatcatttgtgtgtcttgcttgtaagattgtatcacctgtctagctactgcgcctttgcccacccgcgctatgctgtttggttgtgtgaagcgcgatgccgaaaccccgttttttttttcctcttttccattcacccctgcaccatcacgatttttttttctttgccaagcgagaccaagccaaactggcttgtggtcgttgcccgttgtccccggnagcccggactg

SEQ ID NO: 1210 - DNA, 191 bp, Zea mays
  misc_feature: Incyte ID No: 700158315H1
gtagcgttacccaatataataatattatctagttttcttgaacttgttcgaatgatgagtgcttagctgtgtgatctgacgcagagttccctgtgctgactctgtgtcatggatggtccattttatcttgtggtattatcagcctttacataactgctatgtttggatatgttcaattctgttgcaatttt

SEQ ID NO: 1211 - DNA, 268 bp, Zea mays
  misc_feature: Incyte ID No: 700158316H1
  unsure 267: a, t, c, g, or other
ctggatcagcagcgtaccatactgaccgtcggcaacagccacctcaagcagcggatcgcagctcttgctcaggacaagattttcaaggatgctcatcaagaggcgttgaagaaggagatcgagaggctgcgccaggtctacgagcagcagaacctcaagatgtcagccggcgctgctgcctctgaccatgggcctccaccggtgcgcgcggagaaagagctcatgagctagctagccagtccacgcgtgcccgcccgcccgcccgcnc

SEQ ID NO: 1212 - DNA, 82 bp, Zea mays
  misc_feature: Incyte ID No: 700158317H1
acaaagtatttgatctttagtttgacttgactcttttgttaaaaaatgcttatgcaactccttttggcttgacatatatgtt

SEQ ID NO: 1213 - DNA, 263 bp, Zea mays
  misc_feature: Incyte ID No: 700158318H1
gcctccgacatcctactttcgtcctcacgagtgaccgataatccgccggcgctaagatgttggtttatcaagatctcctatctggcgacgagctcctgtcggattcattcacctacaaggagctcgagaacggcgtcctgtgggaggtcgagggaaagtgggtcacccaaggtcctgttgatgtagacattggtgccaatccatccgccgagggtggtgaggacgaaagcgttgatgacacagccgtgaaggtggttgatatt

SEQ ID NO: 1214 - DNA, 261 bp, Zea mays
  misc_feature: Incyte ID No: 700158319H1
atttaggcaatggtactctgatacctcattcttcatcatcaaaccaactttcaaaggattccccgatgatagaagagattatgaacataacaagaggtcagcgccaggttatacatcagctcgacaatctgacaaatctgcttcacgagcatttggtcttaacacgccagactaataataccgccagcaggaaccgggtgctggatagcgacacactcatctgtccacttatttgcctgactgttgccagtatcggttact

SEQ ID NO: 1215 - DNA, 259 bp, Zea mays
  misc_feature: Incyte ID No: 700158320H1
gactaacatgacagagcagtttgctgcattagcagcattatcccaaaatccaggccaagttcgtgatgatgccctcttggatttctataacaagtggcagcatgaatacttggttgtaagcaagtggtttgctcttcaagctacttcagagattcctggaaatgttgcaaatgttcagaagctgctgtctcaccctgctttcgacctgaggaatcccaacaaggtgtactcactaatcgggggattctgtggctcacct

SEQ ID NO: 1216 - DNA, 117 bp, Zea mays
  misc_feature: Incyte ID No: 700158323H1
  unsure 111, 115: a, t, c, g, or other
aggcagtcatggtcatggttggctctgccggatctatctgtcatgaactatctatattatatcattatcaatgttatgcaatgagtctttggcattgagttaaggtaaaanaaanaa

SEQ ID NO: 1217 - DNA, 228 bp, Zea mays
  misc_feature: Incyte ID No: 700158326H1
agttgttgttcagcccagactcgacgacggtgagttcgcagggaacaccgaccccagatgggagcacggactctgcgccgccgaagaaagatcaagaactggttggggcgtgagttgcgatatattgctgttctaggcgattgtagagtgcgtatttgtggtattgatgattggtctgtgcggtttgacgtgaatgggaattgtataggcattgttttttttctatgg

SEQ ID NO: 1218 - DNA, 257 bp, Zea mays
  misc_feature: Incyte ID No: 700158328H1
cactgggaagcaaaatcaaccatagcaagaaattcctctggtttagatgatgctgagaagttatctgatctacctactaatataagtcttccaacaactaagagttctgaacgctggaattcgagtaaagtgccttatcatgaaaaaccaggtattggaacacgccgagaagtgagatcaacactggctagaaattattttgattcagatgacagtgaagaagaactagagcaacagcagattcctcagtcgaagca

SEQ ID NO: 1219 - DNA, 258 bp, Zea mays
  misc_feature: Incyte ID No: 700158330H1
tatatctaggggcgccgtgccagagttatatcttgctagctacttcatttattttcttgaccattcgatccatttggaagatgaagaaggcgaccaagtacctaaagcacctcttctccgccatcgtcgcggcggtgaaggccaggtccaccgccgtgggcaccaaggccagctccctgcagatgcgcctcatcgtcctcggcatcatgcggaacaagaagctcctgctcagcgccatccagaaaaagatccacgcca

SEQ ID NO: 1220 - DNA, 233 bp, Zea mays
  misc_feature: Incyte ID No: 700158331H1
  unsure 98, 213, 226, 232: a, t, c, g, or other
agaaggtgcagtccttccgccatggccgacaggaagaggtgcggctcgtcatggacaagatccgcgcggctgccaccgccgcgccgccggggcgtggnacctgagcgatctcctgtccgggtacaccaacgacgtggtgtgccgcgcggtgctgggcgcgtcgcaccggaaccaaggccggaacaggctgttcagcgatctgacagatatcancgtgtccctcctngggggnt

SEQ ID NO: 1221 - DNA, 261 bp, Zea mays
  misc_feature: Incyte ID No: 700158332H1
  unsure 240, 260: a, t, c, g, or other
caatgcctagcattttcgacgattttcctcccaataatggaccccatgtcacagatgaggaagacgactacttggacccgaccatccctttcccgtgattggtcgaataatatgcctgcccttttttgtgtccttacatgtttggactgttccgatgttgcaacttgcagttctttgctactacaactctatccaccttggatgtcgcgatattgttgatgcaatgcctgggcccatgtncagctgagagctgaccttgnc

SEQ ID NO: 1222 - DNA, 74 bp, Zea mays
  misc_feature: Incyte ID No: 700158333H1
catagatgttattttttttgcatcggtaggctacgtggtataaacagaagctactgcctggcggtgttattaca

SEQ ID NO: 1223 - DNA, 255 bp, Zea mays
  misc_feature: Incyte ID No: 700158334H1
gtgtactttgctgggcaagatgatactccacagccaagacgaattcatgaagagtgatggaagcttggggagcttcttgcacctgaagtgtaaagatggctaatgtaccaggagatgtagctcagaggttatagatttcaaactttcaacggacgcaagtcttgaagagtggatttggctattgatgctgagattcttcaatttctattggccacaccaacttctacatcctgcctatttatgtttctgttttgt

SEQ ID NO: 1224 - DNA, 253 bp, Zea mays
  misc_feature: Incyte ID No: 700158335H1
  unsure 129, 134, 159: a, t, c, g, or other
gtcggaggcgtcgctctcgctctcgcactcccactccgacacgcggacgccggagtcggagatcgacgacgacccgttcccggagctgggctctctgccggcgttcgacgacatgggcccaggcgcacnccagnccctgccggcgtcgtcctgcccaangaggaggtggaggacttcggcgacctcggcggcgacgactggctcgcgggcatcaacctcgacgacctgcagatgccgggggacgccgccgatt

SEQ ID NO: 1225 - DNA, 250 bp, Zea mays
  misc_feature: Incyte ID No: 700158337H1
tataattcccacttgcagagaacttggaattggaattgtagcttacagtccactaggcagagggtttttttgtagtggagcaaaactagttgactcactgtcagagcaggacttccgcaagcatatgcctagacttcaaccagagaatattgtcaagaatgctaagatattcgagcatgtgaatgcaatggcagctaaaaaaggatgcacaccatcacagctagcattggcatgggttcaccatcaggga

SEQ ID NO: 1226 - DNA, 239 bp, Zea mays
  misc_feature: Incyte ID No: 700158338H1
  unsure 226, 231-232, 235-237: a, t, c, g, or other
accttgcttataacagcttgaagggtcttatccttagcaaggctttgatggctcagaaagatgccgaagatgaaagcactcggatagccttcgaaaacctacgctcggaagttatatcacttcggaatgaggcccttgagaaggacaaaatcttgctttctttagttgagaggttaaagtctagcgacgctagattggctagtctttctgaagtggaacaaaaaanaaaannttnnngg

SEQ ID NO: 1227 - DNA, 247 bp, Zea mays
  misc_feature: Incyte ID No: 700158340H1
cgacaagtacgcgctcatcttcacctccagccccgtcgtcctcgacgccgtcgaccacctctcggttcttctcgccttcaccatcctcctcaacagcatccagcccatcctctcaggtgtggccgtcggctccggctggcaatccatggtggcctacgtcaacatcggctgctactacctcatcggaatccccatgggcatcctgctcggatggctattcaaccttggcgtgctggggatctgggcg

SEQ ID NO: 1228 - DNA, 249 bp, Zea mays
  misc_feature: Incyte ID No: 700158343H1
  unsure 4, 10, 36, 59, 78, 83, 89, 100-101, 108, 111, 178, 232: a, t, c, g, or other
ccancaaccnctcccaccccgacccaccgttacatntctccatctcacccgcgcgcccncgcggctccaccacgccanccatngcaatngccgccgccgnngcgctcntcntcctcctgtgcgccgcgtctctcgcgtccgcagccgccgacgacgggttgacgaccttcaaggtgtncttccacgacgtcgtggcggggacgaacccgactgcggtgcgcatcgcgaggcngcgtcctccaacacgtg

SEQ ID NO: 1229 - DNA, 250 bp, Zea mays
  misc_feature: Incyte ID No: 700158344H1
cgctaaagaactggcatgctagtggcataaaggtctacatatactcaagtggaagtagagaagcacaaaggcttctatttggcaatacaacatacggtgacctgcgaaagttcctgtgtgggtattttgataccacaactggaaacaaaagagaaacaaggagttattttgagatctctcagtcactgggcgtggacagtccatctcaaatcttattcatcaccgatgtcttccaagaagccattgctgc

SEQ ID NO: 1230 - DNA, 250 bp, Zea mays
  misc_feature: Incyte ID No: 700158345H1
  unsure 55: a, t, c, g, or other
ggatctgcagccaacttctggaacagtatttcgctctcccaaggttcgcatggcngtattcaatcagcatcatgttgatggccttgatttgacggtgaatccccttttgtacatgatgaagtgctatccgggtgtgccggagcagaagttgagggcacatctgggttcgtttggtgtttcgggaagccttgccctccaatctatgtacactttatcaggtggtcagaagagtagggttgcattcgcgaaa

SEQ ID NO: 1231 - DNA, 250 bp, Zea mays
  misc_feature: Incyte ID No: 700158346H1
  unsure 208: a, t, c, g, or other
ggaaagatgcaagctcatacggaaagagaagtcgtcctttgggtttgtggactactatgatcgaaggtctgctgctctagcaatcatgacccttcatggccgtcacatatatggacaagcaatcaaggtgaactgggcatacgcaagtacacagagggaggatacgtcggggcatttccatatttttgttggtgatttaagttctgangtgaatgatgcaactctttatgcctgtttctcagcatatcct

SEQ ID NO: 1232 - DNA, 267 bp, Zea mays
  misc_feature: Incyte ID No: 700158349H1
  unsure 19, 223: a, t, c, g, or other
gtgggcgctgaggctgaanggcgtcgagtacgagtacgtcgacgaggacctcgccaacaagagcgccgacctgctccgccacaacccggtgaccaagaaggtgcccgtgctcgtccacgacggcaagccggtcgcggagtccaccatcatcgtggagtacatcgacgaggtctggaagggcggctaccccatcatgccgggcgacccctacgagcgcgcccangcgaggttctgggccagttcgcggaagacaagtgcaagctgctc

SEQ ID NO: 1233 - DNA, 264 bp, Zea mays
  misc_feature: Incyte ID No: 700158350H1
  unsure 30, 85, 102, 144, 188: a, t, c, g, or other
cgcgcgaccccgaggccctgcgggccaaanacacggacccgctcgtgttcacgggcgccatccgcgtgaggacgggctacgagancctccgcctgacgtcgnacctgcagcagcacctgcaccggatcgcggtgccgctgctgntgctgcacggcgccgacgacctggtgaccgaccccaggggctcncgggcgctgtacgagcgggcctcgtccgcggacaagtccctcaagctttacgacgggctgctgcacgacctcctga

SEQ ID NO: 1234 - DNA, 264 bp, Zea mays
  misc_feature: Incyte ID No: 700158352H1
  unsure 54, 142, 196, 234: a, t, c, g, or other
cctgacccgaaaaatcctttggagggcaaagaagagagggaagaggtgactttnccaggattcgtcgactgcgtctaccttggtgcaccaagtgaactcatcctggacaatggattgggtgacaaaattgccattgcaaatncaaattggtcagatgcagtcttgtggaatcctcacttgcagatggaggcctgcnacaaagattttgtctgtgtggaaaacgccaagattganatggtacaactggagccaaaacaatcttgg

SEQ ID NO: 1235 - DNA, 225 bp, Zea mays
  misc_feature: Incyte ID No: 700158354H1
  unsure 44, 46, 53, 58, 61-62, 67, 77-78, 80, 83, 94, 103, 107, 115, 119, 123,128, 132-134, 160, 167, 207, 212, 215, 221: a, t, c, g, or other
tgaacatggaagctgccgaatcaggaataaaaggtgtgatgtcnanaaatgcngaganatnncaaancacaccaaannancanctcgtggagancaagaaaancaanggtgacancctngagnatcanaacnnnatgaaccaaagcatgagaccggcacnagaaganattgtgtgggcatggcatggtgaacaacctgacgagaagnagacncancaactntaga

SEQ ID NO: 1236 - DNA, 263 bp, Zea mays
  misc_feature: Incyte ID No: 700158355H1
  unsure 12, 32, 44, 56, 64-85, 97-98, 100, 161, 191, 194, 234, 260: a, t, c, g, or other
cacgcgtaccancgccgtgggctgtgggccancaaggccaagancggcggcgcctnccccaagnnnnnnnnnnnnnnnnnnnnnntggaacccaagnncnaccctgccgacgacgtcaagccccgcgttcccagcacccgcaagcctaagcctaccaagcncaggtcgagcatcacgcctgggacggtgcngancctcctcgcagggcgcttcatggggaagagagtggtgttnctcaagcagctcaagtccggcctgcncct

SEQ ID NO: 1237 - DNA, 263 bp, Zea mays
  misc_feature: Incyte ID No: 700158356H1
  unsure 2, 33, 56, 78, 121, 160, 182, 195-196, 204, 225: a, t, c, g, or other
angcaattcaaggcagggattgtcatgcatgangtccgcagagggttccatttganggagaggctgctaaggcctgcnactgtgaaggtctctactggctctggcaaacaaagtgcaagcncataggcgggggacaaagatgctgctttgtgaatctgancaaacgaccaacaggaactganagacacacatttnnctgttcanaacatgccgaatgtgtttganctcaaatgagacgggatcagctatgtatggtgttgaca

SEQ ID NO: 1238 - DNA, 265 bp, Zea mays
  misc_feature: Incyte ID No: 700158359H1
  unsure 38, 89, 106, 140, 192, 220, 243: a, t, c, g, or other
ctggctttgcagttaataggatgttctttccatacacncaatcagcactcttttatgttgatcttggtatggatgtttataagattgancgtgcttgtaccaaatntggaatgcctatgggtcctttcagactggcaganctggttggttttggtgtggctgtggccactggtatgcaataccttgaaaatntcccagagagggtctacaaatcaatgcnacttcctctgatgatggaggacnatagggcaggtgaagccaccca

SEQ ID NO: 1239 - DNA, 266 bp, Zea mays
  misc_feature: Incyte ID No: 700158360H1
  unsure 196: a, t, c, g, or other
cgcctacatcctcacgcaccccggcaacccgtgcattttctacgaccacttcttcgactgggggtttaaggacgaaatcgccgccctggtggcggtgcgcaaggcaatggcatcacgccgacgagcgagctcaccatccttgagcacgacggcgactcctatgtggcggagattgacggcaaggtcatcgtaaagntcgggtccaggtacgacgtcggccatctcatcccggcgggttttgaggttgccgcccacggcaacgacta

SEQ ID NO: 1240 - DNA, 265 bp, Zea mays
  misc_feature: Incyte ID No: 700158361H1
  unsure 45: a, t, c, g, or other
ctggaccacggcgtggcggcggtcggctacggcgtcggcgacganggcacgccctactggatcgtcaagaactcctggggcacctcctggggcgagggtggctacatccggatgcagcgcggcgccggcaacggggcctctgcggcatcgccatggaggcgtccttccccatcaagacctcgcccaaccctgcagacccgccgcgcaagcccgccgcgcgctcatcgccagggacactcttcttcccagtgacacacacgaccag

SEQ ID NO: 1241 - DNA, 267 bp, Zea mays
  misc_feature: Incyte ID No: 700158362H1
  unsure 111-112, 208: a, t, c, g, or other
atgttattcaagaccatagggaatctaacatctattccctgtggtctagaatgttattcaagaaattttgattcatttgtgctctgataatatatattcttatatacgggnngaacgcacaaccgttatatcgcagcagtccttttttttgttttgttttgttttgacatcagctagtgaccatagtttccttcctgtatagctctgnatgtacttgttttttccatttaaatttccatgcttattcatggttagtaagtgtcaaaa

SEQ ID NO: 1242 - DNA, 206 bp, Zea mays
  misc_feature: Incyte ID No: 700158363H1
cgagaggcgtattagactgacaagcgaacgtgtttactggcgttcaggtaagattttggtttaccttgttatattcaggggtagcgatgaagatttggggcagttggtggaatggagatgaagcagaatagtgggaaaacgaaggtggtgatatctggaggcgcctaggaccgaggacaaagattatgtgtgataagttagtagcc

SEQ ID NO: 1243 - DNA, 261 bp, Zea mays
  misc_feature: Incyte ID No: 700158366H1
  unsure 28, 35, 66, 86, 103, 115, 137, 150, 161, 180, 182, 191, 200: a, t, c, g, or other
caacccgtcagcccctctcgtttttcanccgcctncgcctccaaccgcgtgcgctccacgcctccnccaggaaagcgagagcttcngcataagaacaacaaancaaaagcgtgancagctcggtgccaacaaaaccncaacaaccaagtntcatgtctganctcgacgtccagcttccancngcctttganccgtttgcngaggcaaatgctgaggactctggtgctggtcctggaacgaaggattatgtgcatgtgcgca

SEQ ID NO: 1244 - DNA, 258 bp, Zea mays
  misc_feature: Incyte ID No: 700158368H1
  unsure 124, 131, 135, 179, 229: a, t, c, g, or other
ctcagatcactgtttgcttcgatgtcgacattaacggtatcctgaatgtctccgctgaggacaaaaccactggccagaagatgaaaaaagtcatcacaaagaggtttcgtttaaagcgttaatnatctgancaanaactacacgaactagacagttttatgtcctttcataggattgancgtctccaaggtcaaggcatatagtactggtgtttgtttagacagccgangtcttattttacttgccaagcttggtggg

SEQ ID NO: 1245 - DNA, 254 bp, Zea mays
  misc_feature: Incyte ID No: 700158369H1
acggcgcgcggcgaggaaggcggagtccggcggctgacggagggcgagtggatcgacacgatgcccagctggtccccggacgggagtctgatcgcgttctcgtcgaaccgtcacgacccggcgaacccggccgtgttcagcatctacctggtgcggcccgacggctccgggctgcgccgcgtgtacgtggccggggcggagggcagcgcggaggcggacaaggagcggatcaaccacgtgtgcttcagcccgga

SEQ ID NO: 1246 - DNA, 258 bp, Zea mays
  misc_feature: Incyte ID No: 700158371H1
  unsure 57, 198: a, t, c, g, or other
caacccgcgcgacatcagcctgggctacgccacgttccagccgggcaccaccgtcanggaacaacggcaacggcctcaactacaacaacctgttcgacgccatggtggacgccgtcgtcgccgcgctcgagaaggccggcgcgcccaacgtcagggtcgtcgtgtccgagagcggctggccctcggccggcggcttcngggccagcgtcgacaacgcgcggaaatacaaccagggactcatcgaccacgtcggccgcg

SEQ ID NO: 1247 - DNA, 255 bp, Zea mays
  misc_feature: Incyte ID No: 700158373H1
  unsure 12, 56, 59, 67-68, 75, 78, 92, 97, 100, 146, 155, 157, 160, 179, 195,210: a, t, c, g, or other
cggaacgctggncatgcccctgttcctgtcgctggcttccctcgtgaatggcatcngcnggactgcnnacgcgcncanccgcttcgacctcnacatnacnatccccaacgggctgggcgtgctgttcgcggtggcgcactggtgcngtacgccancnacnacaagtccacccaggagancatcgaggcgcgcaancaaggccgaccagancgccatgaccggggtggtcgtcgacggcggcaagaccaacaacca

SEQ ID NO: 1248 - DNA, 259 bp, Zea mays
  misc_feature: Incyte ID No: 700158374H1
  unsure 129, 171, 191, 242, 257: a, t, c, g, or other
cgacccgtcccacgtctccattggcccgtaccaccaccatcaagaacccaaagctcgtcaggaagcaggacaagatccggagcctcaacaccgttatgtcggcggcggcgagagtcgacgttgagtccnacatcgatgtggtcgcgggcatcgaggccaaagccaggagcngctacgccaacacgttcganaaccacatagatagcaacgactttgtgcgcatgtgctgctcgacgcatgcnacgtgcttgtcaatntc

SEQ ID NO: 1249 - DNA, 173 bp, Zea mays
  misc_feature: Incyte ID No: 700158375H1
  unsure 98, 112, 170-172: a, t, c, g, or other
ctcgtgcacgtgcatgcatcgtagactgtctcaggccgccgctgcgccggcgccgctcgcatcgtttgcttccttggaccagcagtcgtcgccgtcangtgaactgcttgtnaccgtgaattccggacccgtttgcttctgtaagatttgtgcatttgcctgagtaaaannna

SEQ ID NO: 1250 - DNA, 262 bp, Zea mays
  misc_feature: Incyte ID No: 700158376H1
  unsure 241: a, t, c, g, or other
aagccgagcaccgcagaaaaagaaaaagaaaagccaaaggcaaaggcaaaggaatcccaatcaggcaagcaaaaggaagaaccagctgctgcggccggagatgtcgtcgcagctgatcgaggagcaccggtcgggcgcggaggtgcacgtcgggcacgagctgtgcgagcgcaagtcgcgcgagttcatggtggagctgggcctccccgacgggctcctcccgctgcccagcctggacgangtgggtacaaccggtcgacgg

SEQ ID NO: 1251 - DNA, 262 bp, Zea mays
  misc_feature: Incyte ID No: 700158378H1
  unsure 148: a, t, c, g, or other
gtattttgttgagacagaaggttgatgaaagctattgttgcgtccagtatattgaaaatcattttgatcttttggatttccttgttgtttgctataagaacttggaagtcgcgttgaattgtggaaacatgttgcgagaatgcataanatatcctacacttgcaaaatatatattggagtcaagcagcttcgagttgtttttccagtatgttgaattgtcaaacttcgatattgcatctgatgctctgaacactttcaagga

SEQ ID NO: 1252 - DNA, 264 bp, Zea mays
  misc_feature: Incyte ID No: 700158379H1
gttggcatccaagctgtgcaacaactgcaactgaacaaggctaatccgtctgcatcagtacagcagattaaccatatatctccgatggacattttccagattggaacagctaccgatatattcaggagtcttataacaagtttggatacagagggccgctaccttctgttgaatgcaatcgctaaccaactgcgctatccaaatagccatacacactactactccttcatcactctgtatctattttccgaggctacccaggaa

SEQ ID NO: 1253 - DNA, 265 bp, Zea mays
  misc_feature: Incyte ID No: 700158380H1
  unsure 122, 125: a, t, c, g, or other
agatcatagagactggcgatcccgtagcgttcaaagaatacctgcaagagtacgagaacaccatatgcggacgccaccccatcagcgtcttccttcacatgttgaaacattgctcgacaaanatnaagataggctttgtccgctacgagcagtccagtcagtgcaagaacatgagggatagcagcgtgagtatgcatccgcagcagcgaaggttgctggtgcatccggggaagaagataaacaagactgagcgagctacggctct

SEQ ID NO: 1254 - DNA, 252 bp, Zea mays
  misc_feature: Incyte ID No: 700158381H1
  unsure 54-55: a, t, c, g, or other
gggaggttatggtggcggaggctatggggatggtgctgtaactggtggatctgnnggagaaagggagagagacactcgtcccccgtaccgtggcggaggcagacgtggtggttacaggaatgttgagtttggtgatgactctgagaggccaccacggagaaactatgagcgccacagcgggactggccatggctatgagatgaagcgtgatggcgcaggcgagggaatggggcactgccactgatgaactta

SEQ ID NO: 1255 - DNA, 77 bp, Zea mays
  misc_feature: Incyte ID No: 700158382H1
ggtgaccgcttgattgtcatcggaggtccgaggacctataccggtggtaccattgagctcaactcgtggatcccaga

SEQ ID NO: 1256 - DNA, 251 bp, Zea mays
  misc_feature: Incyte ID No: 700158383H1
cgaggagattgcttggttggagcctggaggagttggtgaggagaggtcgcgaacatggagaaccttgctctgctttggagcatcatcggcccgggcgtgtccggtgccatcttcggggccggatggtggttctgggtggacgcggtcgtttgcagcgcggtccaggtctccttcctccactaccttccagggatcttcgcttcgctggcggcgctcatgttcaattgcgtgaacaaggatgagatcggata

SEQ ID NO: 1257 - DNA, 230 bp, Zea mays
  misc_feature: Incyte ID No: 700158386H1
  unsure 33: a, t, c, g, or other
caatggggaacaggcacctctgctgcctgtgcntgctccttctcctgggactggcgtccggccaggtcctgttccaggcgttcaactgggagtcgtggaagcagagcggtcggatggtataacctcctgatggggaaggtcgacgacatcgcctccgccggcgtcacgcacgtctggctcccgccgccgtcgcactccgtctccacccaaggttacatgcctggccgtct

SEQ ID NO: 1258 - DNA, 250 bp, Zea mays
  misc_feature: Incyte ID No: 700158387H1
  unsure 186: a, t, c, g, or other
ggggtgacgaaaatggctccaacgaccgccaccaaggacgacagtggctacggcgacgagcgccggcgcgagctgcaggcgttcgacgacacgaagctgggggtgaaaggtctggtggactccggcgtcaagtccatcccgtccatcttccaccacccgccggaagccctgagcgacataatttcnccggcgcctctgccgtcgtcgccaccctccggcgccgccatcccggtggtggacctctcggtga

SEQ ID NO: 1259 - DNA, 253 bp, Zea mays
  misc_feature: Incyte ID No: 700158389H1
  unsure 86, 91, 98, 235: a, t, c, g, or other
ccttcccgaccagagcaagcacgccaccgcttccgtcgtcgtcctcccgaccgtctcactcccgcccccacctccgcatccgatcnccganacctaanaatccaacggtcgcgcccgcgtcctctcggatggaggtggcccagccccaggcgagcaacgcccagggaggggcggagcggccatgaagctactgttcgtggagatgggcgtcggctacgatcagcacggccaaganatcaccgccgccgccgtg

SEQ ID NO: 1260 - DNA, 206 bp, Zea mays
  misc_feature: Incyte ID No: 700158390H1
  unsure 137, 149, 173, 177, 181-182, 187, 190, 192-193, 197-198: a, t, c, g, or other
acagtatcgacagtgttttgtctctacacagattgcagatatagcggtttaaacagttcgctttaatccgaaacgaacaggctattttacctgaatcatatactgcaatgtgtcagttttagaattttccccctaanacaaaggttganagaatgtcatcagcaccttttganaaanaaannaaaanaanannaaannaaaaaaaa

SEQ ID NO: 1261 - DNA, 254 bp, Zea mays
  misc_feature: Incyte ID No: 700158391H1
  unsure 216: a, t, c, g, or other
cacagggttgaaggctctggagaatgaatatggttctggtgaaattgttaagcagggaacagaaatagttcagagagctgtcaccaaatcattccagtccctacatgaagcatacaaagggaaaattgttgggctggtaatatccacaaatgaggctccatcatccttaggatccataattgacgcaccatcttcactgcacatttcaagacagcnagaagaagcaagcaagactacagacatagcctctgtgg

SEQ ID NO: 1262 - DNA, 254 bp, Zea mays
  misc_feature: Incyte ID No: 700158392H1
  unsure 121, 182, 185, 225, 230, 234, 238: a, t, c, g, or other
gttctctgtttttttatgaagcccaataagattgggtcgagcactgttttaggatcgaccgcacacaacaccacctctattttaaactgcaatggacaagaagctcagggtctcatttacncatctttgacttctctctgtggagcacttgtaatcgaagatcgtgccctgttttctgtacnatntcaaactgcatgcagactcctgggttccgttgcttttgcnttgcntcanaganattcctttggtccttc

SEQ ID NO: 1263 - DNA, 260 bp, Zea mays
  misc_feature: Incyte ID No: 700158396H1
  unsure 19, 48, 60, 86, 108, 157, 210: a, t, c, g, or other
gccaaccaatctgatcaanacaatgtcttcagcggtcaagtaatcacngcggttaaagangcatgcagagcagctgttcttcagancaagccaaggcttgttgaggcnatgtatttctgtgagttgaccacgccaaccgagcagttaggtgcaactnatgcagttcttggtaagaggcgggcaaggattctgaaagaagagatgcaaganggaacctcgttatttacagtgcacgcttacctgccagttgcggagagcgt

SEQ ID NO: 1264 - DNA, 77 bp, Zea mays
  misc_feature: Incyte ID No: 700158401H1
  unsure 41, 48: a, t, c, g, or other
caacggcaccctggcctgaagaagcacgacgagtacgatgnggaggangagtacggccaagtagtcgacgcggagta

SEQ ID NO: 1265 - DNA, 267 bp, Zea mays
  misc_feature: Incyte ID No: 700158403H1
  unsure 259: a, t, c, g, or other
cagatgggttattcacccctgcccttctttacgatagggcggtatggttgtctggaaatgctagtgctaggcaagattcagcagtaatgcaaaggactaattcagacaggagttcagaatcgcgctctgatccttcaaccaatggtctgtacaacttgagctctgagaggcaggccagtaatagtgacctactggagcgtagatcagtttttcttgagaggaggcggaggatacggtctcaggtcagagctctgcaaangttgggca

SEQ ID NO: 1266 - DNA, 81 bp, Zea mays
  misc_feature: Incyte ID No: 700158406H1
  unsure 20: a, t, c, g, or other
gcgtttgcttccccaccacnccgccgcgccgccgcctgtaccagctgcgtcaagatgagtcggcaccctgaggtgaaatgg

SEQ ID NO: 1267 - DNA, 211 bp, Zea mays
  misc_feature: Incyte ID No: 700158409H1
agcgacctggagacggagaagaagaagaccccggtggcgctgatgcccatcgcgaacctctcgctggaaagaagctctgcaagcggaccctcaagctcgtgcgacgagcctctgaggccaagtgcctcaagcgcggagtcaaagaggtagtcaagagcattcgccgcgggaacaaagggttgtgtgtgattgctggaaatatttctcctat

SEQ ID NO: 1268 - DNA, 262 bp, Zea mays
  misc_feature: Incyte ID No: 700158411H1
  unsure 89: a, t, c, g, or other
gcaagatcatcctcacaagccggtcagacaagatcgtcaagttcggaacaaggccagctctgcgtctcagctacgtgtccagcgaagtntctggtatttcttcaagactatcacatttggcagcacggatcccaaggtgcacccaaggctcctgcaccttgccatggacatagccaagatgctggacaggtctctcatcggagcaaacatcaccgcttgtttgctgagggagaacttcgacgtccactactggtccaaagtt

SEQ ID NO: 1269 - DNA, 204 bp, Zea mays
  misc_feature: Incyte ID No: 700158414H1
gaggagtgcgtgcgtaggcgtactgggagaaggtgtccgtacgtacgtagccaggcacggcacgcgtgacgcgtgtgggggcactgccggccagcacgctgggccagtgcgacactgtgagcctgcgctggtgtgtctcctcgaccagcatgcgtccaccgcgtgtccgtgtgctgccacttgaatgcagatttggttctttcc

SEQ ID NO: 1270 - DNA, 198 bp, Zea mays
  misc_feature: Incyte ID No: 700158415H1
  unsure 60: a, t, c, g, or other
ccccgtttcagtttgcttatagcccgaagacttttctgctgtagtattggaatgccaganacctttggctggacaagaggaatttgcgaaggccgtctggctgggtgtgttgcgtcgtcattggggtcgagtatggccggttgtgttcgtcgttatattgagtggatccgaatgaatgtgggttagattggagctttc

SEQ ID NO: 1271 - DNA, 265 bp, Zea mays
  misc_feature: Incyte ID No: 700158417H1
cctgcctatctatctagcgagagagagagaggaaagctagctagctagcatggagtgcggcagaagaaggcagcaggcggtgtgttggcgctgctgcttctccagctggtgttagctccgacgacggcgacggcccgcctcctgcaggcggatacctccaccgtggttggcctggacatcatcgcgagggagtttggccatccagtgagaggcatcctctgtggtgaaactgtgtcttcctaccatgctatacggcagccatggg

SEQ ID NO: 1272 - DNA, 263 bp, Zea mays
  misc_feature: Incyte ID No: 700158418H1
gaacgcgctgggcgatcttgtccccttcaccaacaaggtgtacaacggcagcctggacaagcggctgggcgtcaccgcgggcatctgcgtgctcatccagcacgtccccgaccgcaacggcgaccgctacgaggccatctacagcttctacttcggagactacggccacatctcggtgcagggcccgtacctgacctacgaggagtcgtacctggcggtcaccggcggctccggcgtcttcgagggcgtataggccaggtcaa

SEQ ID NO: 1273 - DNA, 258 bp, Zea mays
  misc_feature: Incyte ID No: 700158420H1
atgatggggtagactttagaacacatactgtgtcgcctggtgaaaggaaattacgtctgctgaaaaatctctcttgccaaatatagtttttcttctgtattctagtgttgtattctagtgtggtagacagcgactctacactgactactgagggtgtgtttggtttggttttgacttttgctctctaaaaacgaaaagcaaacggcccgagccagaaagcagcttttttcaaaagcatgctttcttgcaatgcaaatt

SEQ ID NO: 1274 - DNA, 247 bp, Zea mays
  misc_feature: Incyte ID No: 700158421H1
caactcactagtactcagccgccgcaatcagggacaggtagctcgagcgcgcgctccacctgctccgacgcgatgcgggccaagtggaagaagaagaggatgcggaggctcaagaggaagcgccggaaaatgaggcagagatctaagtaggcgcatcttgtgaccgaggatggcgagcttctcctgcaccatggctgagacgcgttgggatgattgtctccctttgtagacgtgctttgctgtagac

SEQ ID NO: 1275 - DNA, 257 bp, Zea mays
  misc_feature: Incyte ID No: 700158422H1
ggaacatatctggtgcatatataaatttagtgtacatggtgcatatattaaaacagcattactcattttagatataatgtctctagttgttggtatattttgctaagaacaccctccgacgtggtgaagtatagcggtggaaaatattatttataaattgcaatgatcaactagagacgttaaatctaaaataaatagtgatgatttaatatgtgcaccatatatactaagcttccatgtacaccagatatgtcctc

SEQ ID NO: 1276 - DNA, 257 bp, Zea mays
  misc_feature: Incyte ID No: 700158423H1
ctcattattattctcactggtcgatctgctaacacaaacagcagcagctcctcctcactagctagccttctctatttttgctactgcaagtgtccaagtctgcgacgacgtccgagatgtcgacggtgagccgtgcatcccttgaccagaagcttgccctcgccaagcgctgctcccgagaggcgactcttgccggagctaaggcggcagagtggcgactatcgcctccgcgattcccaccctcgcgagcgtgcgga

SEQ ID NO: 1277 - DNA, 246 bp, Zea mays
  misc_feature: Incyte ID No: 700158424H1
ttattctggtgaagggccagaaattccttgagacaacggatgtctgctctgtgatacatgcatgcaaagcaggcacacaagcatcaatggaagccatgcctctgtctgccatgttgtgaaggtgatgcgaatcagaataaggcttatttgcctaggagatcaaattggggagaaacgatgaaaagtcagatgactgttttaagctctcttcctctattgctgaaacactattgatcggtgaaaatt

SEQ ID NO: 1278 - DNA, 257 bp, Zea mays
  misc_feature: Incyte ID No: 700158426H1
gtgatggcggcggacacagagcctctcgagatcctgctccacctccccttgttagctgaggataagaacgtgccatatgtgtttgttccatcgaagcaagctcttggccgtgcttgtggtgtgacaagaccggttattgcttgctcagtgaccagtaatgagggtagccagctgaaactacagatacagggtctcaaggactccattgagaagcttctcatctgatctgccgaagacctttcagtgtgatgggctca

SEQ ID NO: 1279 - DNA, 262 bp, Zea mays
  misc_feature: Incyte ID No: 700158428H1
aaaacagttctgagctccgccttgctgctgatgattaaggagaagatctcgaagttcacttgggtctcactgcttgccctgcggcggtatcttttcgtttctcagaagaggatcaagagtgcaactgtataaatacgttagctccaaaacacaaactagcacacatagcgacatggtgcttctggagatgttatgccaaggaataaatctgaggaataatcagcagaaatacttaaccaagagagagagaataaggtgtgta

SEQ ID NO: 1280 - DNA, 264 bp, Zea mays
  misc_feature: Incyte ID No: 700158430H1
gacgacggtcctcaccggcgtattcctcagggccaccgagctgacgctgaagaggcttcttgtggtcgaaccctttgtcacctacgggtttccaaacttgaagaacgtgaaagagcttatttacaagaagggccgtgggtttttcgacaaggagcctttccctcttaccagtaacgatctaattgagaaggctcttggagatcacggcatcatatgcttggaagacgttgtgcacgagatcgccacggttgggccgcacttccg

SEQ ID NO: 1281 - DNA, 265 bp, Zea mays
  misc_feature: Incyte ID No: 700158431H1
cctgcttctgttttgcactttctatgcgtatttttgcactctatatgtgttaaggttgacttaaatctgattattcgctcggttagatttggtatcctcatagtgtgtaggtctatctgtcttagaaatactaagtcaaatgttccgcattagcttgcaacccaaagtcttccgcagatagtaatgatatacggaatatcacatttggcagttgatattgattatttaggcgaagggaaatggcaaccgttccaggggatctgat

SEQ ID NO: 1282 - DNA, 269 bp, Zea mays
  misc_feature: Incyte ID No: 700158432H1
caccaactaggatcgatctctcgacagcaaatagctagcaatggagaagtacaccaaagccctagcgtcattgctcaccatgctggtgctggcacctctcctcgccatggccaccgacccagaccccctgcaggacttctgcgtcgccgacctcaacggcaagctgtcagtgaacgggtacccatgccagccgccgtcgtcggccggcgaccagttcctcttctcgaccaagatcgccacgggaggcgaccccctggccaacccgaacg

SEQ ID NO: 1283 - DNA, 258 bp, Zea mays
  misc_feature: Incyte ID No: 700158434H1
  unsure 6, 39, 59, 65, 127, 136, 145, 151, 181, 228, 232, 234, 248: a, t, c, g, or other
agcgcnttcgcgtacgtcaacggacgtcgaacccatcgnccatgggaggagggcacgangagcangagggtggcggcgcaaaggccgggggctactcctccggtctcccgccgtcggagccgccgcncctgcaggnccagccgcngcaggngtacgggtacggcacgttccagggccctcngcatcctcccgtcgggttcccgcagcctgccccgcctccccggttcngcgncngcggcggctaccanaaccagcaag

SEQ ID NO: 1284 - DNA, 254 bp, Zea mays
  misc_feature: Incyte ID No: 700158435H1
  unsure 213: a, t, c, g, or other
cggacaccttccacaacgggcagtggatcgccttcctccacgtcaagcccggctcgctggcgcagggcagccaggccgccagggtgttccgcggcagggacgtcgatggccggactcgggacttcgtcgtcgcctggtacatcccgtgggacaacataccgacacgagcttacactgaaattggcagtgaaaatacttcaagactcggtggantagtgtcaaaacgagtctaggacattcaaggagagtgaccc

SEQ ID NO: 1285 - DNA, 251 bp, Zea mays
  misc_feature: Incyte ID No: 700158436H1
  unsure 125: a, t, c, g, or other
taagggtactacaacagctaggcgccataatgtctgcttggacacttccgctgtgtaaatacgcgcccaataagagcggcgtatggatagatgttgtcactatggaccattacttgttgtatgcnctgtatatctgtggactgttgtggtgttgtattacttcaaagcttcatggttcatgaactaatacaacaccacaacagtccacagatatacagtgcatacaacaagtaatggtgttgtattacttc

SEQ ID NO: 1286 - DNA, 254 bp, Zea mays
  misc_feature: Incyte ID No: 700158437H1
cacggcgtggcggcggtcggctacggcgtcacgaacgacggcacgccctactggatcgtcaagaactcgtggggcccttcctggggagagggcggctacatccggatgcagcgcggcaccggcaacggcggcctctgcggcatcgccatggaggcgtcctttcccatcaagacctcgcccaacccgtcgcgcaaccccgccgcgcgctcatcaccagggacgcctcttcccagtgacaggctgatccatctcgg

SEQ ID NO: 1287 - DNA, 251 bp, Zea mays
  misc_feature: Incyte ID No: 700158438H1
gaggcgcgctgcatgcccggcgaattcgattcggatgtcgaggcctccgactcggaggacgcggacagaagcagagcgagttcgccatgaagatctccaactacgccaatattgtgctgctggtcttcaaggtgtatgcgacgatcatggcaactctaggtttccaggtcttggtccaggccgtcgaacagctggtggagaacaaacctggcgagaagatgacatcggagcagctgatatggttgtactcc

SEQ ID NO: 1288 - DNA, 250 bp, Zea mays
  misc_feature: Incyte ID No: 700158439H1
gctggtggtgattgacttcactgcaacatggtgtcctccgtgccgcgccatggctccaatttttgctgatatggccaagaagtccccaaatgttgttttcctgaaagttgatgtggatgaaatgaagaccattgctgagcaattcagcgtagaggccatgccaacattcctgttcatgagggagggcgacgtcaaggacagggtcgttggcgcacaaaggaagagctagcaaggaagcttgaactacaca

SEQ ID NO: 1289 - DNA, 181 bp, Zea mays
  misc_feature: Incyte ID No: 700158440H1
  unsure 170: a, t, c, g, or other
atcaaatctataaaatgaataactcggacatgtcatgcgtgcatgtccgtcgccgaataatggatgtgtgtgcttcgctccaataaattgctagtaaaaataatggcatcgtcggtatgcatgaataaaatgtatcagaatgttcatcctttcacgattggatatatganaatgtgctcag

SEQ ID NO: 1290 - DNA, 178 bp, Zea mays
  misc_feature: Incyte ID No: 700158441H1
gtgggacgggccgtgcgtccgttccagcgaagaggagcagcgggtcggaggagccgccggcgaggtcgggccgcgggggatcgagatggtgctgtgggagctcacggccatcaccgcctacttcctcgggctgaggcgcacctaccgcctcgcgctccgcatccagcgccgcctcatc

SEQ ID NO: 1291 - DNA, 254 bp, Zea mays
  misc_feature: Incyte ID No: 700158443H1
gccgtgtgttcaagacatggtctgattggctcaatgacaacatcgatcctgcccgaacgtccgtcttcttcatgacgatttctcctcctcacctcagcccacagaattggggaaacccggacggtatcaaatgtgtaagagagacgcttccatatcagaactacagccaacacctggatctttaccatgacatgcggctgtatgacttagtggtcaatgtggccagctccatggagaaggtcccagtgacagtg

SEQ ID NO: 1292 - DNA, 257 bp, Zea mays
  misc_feature: Incyte ID No: 700158445H1
gtcgacggtgagccgtgcatcccttgaccagaagcttgccctcgccaagcgctgctcccgagaggcgactcttgccggagctaaggcggcagcagtggcgactatcgcctccgcgattcccaccctcgcgagcgtgcggatgctgccgtgggccaaggccaacatcaaccccaccggccaggcgctcatcgtctccacggtggccgggatggcctacttcatcgccgccgacaagaagatcctgtcgctggcgaggc

SEQ ID NO: 1293 - DNA, 263 bp, Zea mays
  misc_feature: Incyte ID No: 700158448H1
  unsure 56: a, t, c, g, or other
ggaaacgaaaaaggcctcactcatctccgtccgtccgccgcaccgtcgccgagcgncgctccgcgccggagacgtcctgtttttttgccgcctacgagcgctgtccctcttttctttccgcggttctgccccaacttctgcatccgaatctcccacgaagttgtcacggcgatggcagcgaccggcggcgtttcaactgacgatatcccgatcctgcaggcagagaacctcaccagcaacgtcaagtccgtccactacagtcg

SEQ ID NO: 1294 - DNA, 239 bp, Zea mays
  misc_feature: Incyte ID No: 700158449H1
  unsure 146, 165, 170, 181: a, t, c, g, or other
gcccctctcgtttttcatccgccttcgcctccaaccgcgtgcgctccacgcctcctccaggaaagcgagagcttctgcataagaacaacaaatcaaaagcgtgatcagctcggtgccaacaaaacctcaacaaccaaggttcaagnctgaactcgacgtccagcntccanctgcctttganccggttgctgaggcaaatgctgaggactctggtgctggtcctggaacgaaggattatg

SEQ ID NO: 1295 - DNA, 145 bp, Zea mays
  misc_feature: Incyte ID No: 700158450H1
  unsure 137, 139, 143: a, t, c, g, or other
ggcggaaacgccagttcagccacgtggagagggcagatccgagaagagccggcgcgatgagctcgccggcgaggtcgaccatctcggccgccgaagacgtcgctgattccatcgacgcgctctaccgcaaggacgangncccngc

SEQ ID NO: 1296 - DNA, 121 bp, Zea mays
  misc_feature: Incyte ID No: 700158451H1
  unsure 107, 115-116, 120: a, t, c, g, or other
tgcaaagatcctattatctgcaggccgaaatagggctatactgttagctaatgctagtgagatcgcttgacactttgagtgcatatcatggaagctggacatgcagntcctggcnntttng

SEQ ID NO: 1297 - DNA, 120 bp, Zea mays
  misc_feature: Incyte ID No: 700158452H1
  unsure 110, 112, 116: a, t, c, g, or other
cgcggccagtagtgatcatggtgaaggaagaggaggaggtcatggcagaggcagcaggaggtggacgcggcggctacatggacctgctcggtctcggggaagaggtcgangngaantcct

SEQ ID NO: 1298 - DNA, 229 bp, Zea mays
  misc_feature: Incyte ID No: 700158453H1
  unsure 102, 108, 112, 115, 155, 162, 199, 202, 204, 212, 224: a, t, c, g, or other
gaaagtacttgatgtcggatgtggaattggaggcggcgacttttacatggctgcaaactatgatgtccatgttcttggtattgatctttcggtgaacatggngtcaantgcnaanggacgggcccaaggacgcaaggccccgtggaaatcgaagncgccgangcaccacaaaggaagacccagaaaacagtcctgacgncancnacagccgngacaccaaccgncacag

SEQ ID NO: 1299 - DNA, 121 bp, Zea mays
  misc_feature: Incyte ID No: 700158455H1
  unsure 97, 105: a, t, c, g, or other
cgctccaatgccaacctatgaatttgaatcatggaacatcagcatgcttgattgtagctctagtggtcagtggcagcattggcttcgtccttggagnagttcgcnagccttgcgtgcaatg

SEQ ID NO: 1300 - DNA, 98 bp, Zea mays
  misc_feature: Incyte ID No: 700158456H1
  unsure 93: a, t, c, g, or other
agcaaatgtattacacagttactgctgcttggggcaattgagagcatacagaagaagtattggagcaggctaaaagctacacagcagagagcnataat

SEQ ID NO: 1301 - DNA, 233 bp, Zea mays
  misc_feature: Incyte ID No: 700158459H1
  unsure 121, 141: a, t, c, g, or other
ctctcgtgagaacaggaggaaccgtgagcccccgcagcgcttcaggcgccgggatgatggcccaaggccaggtcagggcccaccgcgcccaggtgctgctgccacagcagctccccctgcngccgctcctcgtacctaagntcaggaatgcgattcagggcttagttctctcacctatgggataatggacttttcctgttttgaaaaccaatgtactgtgcccccttgatgtt

SEQ ID NO: 1302 - DNA, 233 bp, Zea mays
  misc_feature: Incyte ID No: 700158460H1
  unsure 112: a, t, c, g, or other
gctacatacgtcctcctccattaatattggcagcaagctaggatcatcagcatctgagcttattattactaaatcgatcggttgccatggcggggatgagagtcggcaagcnggcgctggctgcggtgctgcggtgcgcggcggcggccatggccacggcgcacaggcctccggcgtgcgcgccacctacaacttctacaacccgcagcagaacaactgggacctcaacgccg

SEQ ID NO: 1303 - DNA, 238 bp, Zea mays
  misc_feature: Incyte ID No: 700158462H1
atcaatttaccggcaggttattttaccagtcacaatgatgcttcctggaatcaaaataactatcttccgaacaaatcatggaaccttcaatcctataatatcttcatacagaaatcagaactgaactgaaggttatgagcaaggatgaactgtgttccggccgtcccgttatatgaattgtgtcaagggtaataacaatattagtttggatggagcaggaacaagcattgctgcattg

SEQ ID NO: 1304 - DNA, 85 bp, Zea mays
  misc_feature: Incyte ID No: 700158464H1
tgatggtagtaatgaagtaactggaattcggaaatttggaactaacaaaaccccccgtggatttgtatgatatgttttgttcgac

SEQ ID NO: 1305 - DNA, 118 bp, Zea mays
  misc_feature: Incyte ID No: 700158466H1
  unsure 99, 103-104, 111: a, t, c, g, or other
gtgatcgatccgtctgcgcgcacccaggcattatcccccggtgactctcatcctcctccacttctccatggcttcttttctttctctcgctcgcatgtnaaanntgtggcnacccccc

SEQ ID NO: 1306 - DNA, 112 bp, Zea mays
  misc_feature: Incyte ID No: 700158469H1
  unsure 69, 73, 101, 109: a, t, c, g, or other
catggaggagctgtatccttaggacatcctctcgaggtgcagtggtgctcgcattttggttacccttantggngttctcagggcgaagagtggcaagatcngagttgcngtt

SEQ ID NO: 1307 - DNA, 113 bp, Zea mays
  misc_feature: Incyte ID No: 700158470H1
  unsure 84, 95, 100, 105, 109: a, t, c, g, or other
accaaatccgtgctctatggttgggagacacatgtttttatgggtacaattgttgtattggtgcttggcgagcaaacatggcantcgttttgcgnaggcnagggngtgncccg

SEQ ID NO: 1308 - DNA, 226 bp, Zea mays
  misc_feature: Incyte ID No: 700158471H1
  unsure 89, 92, 108, 121, 130, 150, 169, 201, 204-205: a, t, c, g, or other
aaatacatctacattgctggatttttccttacagtgtcgcctgattctatccagctagttgctgagcatgctgcagcaaataacaaggnggncctgatgaacctctcngcgcccctcaacngtgaggtcngccgggaagccccagagaanggccccccggaagccggcnacaacgtcggcaacgaaaccgaggcaaagacnttnncaaaggcagaggagggagacg

SEQ ID NO: 1309 - DNA, 228 bp, Zea mays
  misc_feature: Incyte ID No: 700158473H1
  unsure 2, 98, 120, 125: a, t, c, g, or other
gncgggctcttccgaccccgacaagctcatgagcaaagccgacaaactaacaaaattgagttttacaagatggaatgctgattggaaaagcgctaccnccttgtatgagcaagctgcaantgcgnatagggtcagaaaggacaatgagaaagcaaaagatgcttttgagaaggcctcaaaaggacaggaaatgatctcctcaccatgggacgctgctaagcatatgga

SEQ ID NO: 1310 - DNA, 118 bp, Zea mays
  misc_feature: Incyte ID No: 700158474H1
  unsure 106: a, t, c, g, or other
atattttggcaagtgcagctttgaataaattgaacagattggcctcgtggccattttcctgtatttatctgtagtcaggtccaattcttttctgttggtgagcgcnagtcattcatag

SEQ ID NO: 1311 - DNA, 137 bp, Zea mays
  misc_feature: Incyte ID No: 700158476H1
  unsure 112: a, t, c, g, or other
aagcagcttttgttcttgcatgttttccctgcaatgagcttgagcagcttgatcagggctggttttgtggaagtggaattgaaggggatccatagagaggaatttccttgcnatttttgaatcgaaagtgaatttct

SEQ ID NO: 1312 - DNA, 227 bp, Zea mays
  misc_feature: Incyte ID No: 700158481H1
tgcacgtcaagtcgtacgactggctcaacactgctgaccccgatccttcttccgccacgagcaccaccagcaccagttcttcgtcctccgatggcccatgcctgaggctagcggaactggtggtggacgacgtcttcacggcgccctgcgacacctccgtgctgtacccgacggcgggagggaacatgcaccggttcaccgccatggcgccctgcgcgatcctcgac

SEQ ID NO: 1313 - DNA, 102 bp, Zea mays
  misc_feature: Incyte ID No: 700158482H1
  unsure 27, 99: a, t, c, g, or other
ctcattttttcaatatacctgtatganaaccttttagcagtaacttgtcatttagttactgtaaaacaggtagagttttttttttataggagaaaaccnccc

SEQ ID NO: 1314 - DNA, 96 bp, Zea mays
  misc_feature: Incyte ID No: 700158483H1
  unsure 6, 18, 27, 93-94: a, t, c, g, or other
caaganggtgggacagangtggttgangcaaaggcgggaaaaggctctgcaacgttgtccatggcatatgctggtgctgtttttgcagatgcnngg

SEQ ID NO: 1315 - DNA, 78 bp, Zea mays
  misc_feature: Incyte ID No: 700158484H1
  unsure 65, 67, 72-73, 75-77: a, t, c, g, or other
atgtaacgtaatacggtgtcgcatatgcaccgggatatggtatattgaatggagctatgcgtaananaaaannannna

SEQ ID NO: 1316 - DNA, 113 bp, Zea mays
  misc_feature: Incyte ID No: 700158485H1
  unsure 43, 67, 81, 96, 103, 105, 109: a, t, c, g, or other
tcccgttctcggaggatgacttgcccaagataccctacctganagcggtggtgctggagggtctccngcgccatccgccgngggcaccagaagaangtatggntngggngggg

SEQ ID NO: 1317 - DNA, 221 bp, Zea mays
  misc_feature: Incyte ID No: 700158487H1
  unsure 80, 103, 124, 131, 136, 146, 156, 175, 213, 216, 219-220: a, t, c, g, or other
aatgacttgagaggtgtaggataagtgggagcctccgggcgcaagtgaaataccactacttttaacgttattttacttantccgtggggcggaagcggggcancgcccccccctttgctccaangcccggncgcgncgggcgaaancgggcggaanacatgtcaggcggggaganttgccggggcggcacagctgtgaaaagacaacgcaggngtnccnna

SEQ ID NO: 1318 - DNA, 219 bp, Zea mays
  misc_feature: Incyte ID No: 700158488H1
  unsure 6, 41, 48, 97, 124, 137, 140, 145, 147, 153, 165, 181: a, t, c, g, or other
gcaggnaagagctagagccttgttgccgcagaactcccccnctatggntcgcatgtggatgctaacaagattcttgcttatttttgcagtagatggnactgagaacagaatcagatgttgtaancgatacatacagncgngcatngnccgaanggaccattgttngggcgtagcgcttgtncggtgcctgactgcagtctgcagagcgagatgtcgccc

SEQ ID NO: 1319 - DNA, 224 bp, Zea mays
  misc_feature: Incyte ID No: 700158489H1
  unsure 98, 114-138: a, t, c, g, or other
gtttcaggtgcaacgcgccacgggactccggtagcgctgccacgacgacctacgaaaactacttgcactgaggtgtaggtagagcaaagtttacagcnatagcgcgcgtcgacnnnnnnnnnnnnnnnnnnnnnnnnngaaatgaagaggagtcctcatcatcacatcataagggagcagcagtagatttaattgcaaaattaaagacacccgcgatgcatgcc

SEQ ID NO: 1320 - DNA, 103 bp, Zea mays
  misc_feature: Incyte ID No: 700158491H1
  unsure 20, 65, 80, 94, 96: a, t, c, g, or other
gtggcagtggtggccgagangggtgacatgtccaagtggaagctccgatgtgacattaccctcgnagccgtcctttaacnggggttttgtggtnangggactg

SEQ ID NO: 1321 - DNA, 230 bp, Zea mays
  misc_feature: Incyte ID No: 700158493H1
  unsure 2, 84, 97, 103, 105, 109, 119, 124, 134-135, 140, 182, 210: a, t, c, g, or other
cnttgactcgagttgcaaggaataaggtgataaagatgtgcaaagtgcaattgagtcaccatggagaagatgaagcaaagtggnaaagagaagaagngcttcncntagnatttccccanctgtncccgagaccnnctatnatctcgaggacgagattatttttaaggggggtaggatttgtnacacccactttgtaattgctaggaatantaccagtagaggaacaattt

SEQ ID NO: 1322 - DNA, 188 bp, Zea mays
  misc_feature: Incyte ID No: 700158495H1
cgagaagtaaaagtgttgtgttcacaatctcggatgtacattctttgtctgttgagtctgtagactatatatacccatagctcttgtgaggccggtaaaagggtaaaaaagcgcaaaaagagagaaaaatgacggtgaagtttgactgataggtaatatctttggtgaaaatgcaattgtagtatttc

SEQ ID NO: 1323 - DNA, 234 bp, Zea mays
  misc_feature: Incyte ID No: 700158496H1
  unsure 164, 172, 177, 201, 209, 220, 223: a, t, c, g, or other
agcagagaaggacaaggaaagagccgagttcaaagcacgcaaggaagctgaggagagagagaagaagaaagcaaatagagacaaaaagaaaggcgcacaccagcagattcgagcgccattggtgacagccatgctgctgcttcggctacagcagatactggccngtattgcntcggncaacccaagggaactgacgttctnaacccacngttgcttccanganggcggctaaga

SEQ ID NO: 1324 - DNA, 123 bp, Zea mays
  misc_feature: Incyte ID No: 700158501H1
ctgctctaaagcagcgtgcggtttttggactcgagatggtatgagtatatgtacgtgctgtccttgtgtgattatgtataccgtcatggttttctttgtgggaagaaaaaggacattctgttt

SEQ ID NO: 1325 - DNA, 265 bp, Zea mays
  misc_feature: Incyte ID No: 700158503H1
  unsure 9, 250: a, t, c, g, or other
ccctgctgncagctctgcccgtactcatgatgataatgagagcgcaagatgtgtaatttgcctggaggattacaaattcgaggactctgtcgggaagctaaaatgcaatcacaagtatcacgcagactgcatcaagaaatggctgcaggtgaagaacgcttgcccagtctgcaaagcttctgcggcagatgacggcggaggcaccgaatgaagcgccctgccgcccccattcaccctatctcaggcgaantgtactggctgatct

SEQ ID NO: 1326 - DNA, 264 bp, Zea mays
  misc_feature: Incyte ID No: 700158505H1
  unsure 86, 163, 184, 208, 212, 226, 228, 230, 243, 251: a, t, c, g, or other
gtgagttctccgacctcccctttaaaggtaaacttgtcggtcatcgacagacgttctttcaaagagcacagtgatattgtcagagntttggttactgctggatgtaagctgtgtggttcgcctctctatcacaaaaaccttcatgaggaaaacacgtttgcanttgattgtcctaataacccanaatatctccatgttcctggtcagntatncaggccatttctgntntntatctatgaccantctggacnagttcctttgctt

SEQ ID NO: 1327 - DNA, 263 bp, Zea mays
  misc_feature: Incyte ID No: 700158506H1
  unsure 103, 121, 180, 187, 205, 225, 251: a, t, c, g, or other
cattctcatccccgacccccgcaccgcagcgtaaaccctagtccccggcggcgaccttgcggcctccgctgcgctctgactggtgcgcgtttagacgaggagntgcggcggccaagaccantcgaccatggctacccgtatccagtttgagaacaactgtgaaattggtgttttctccangctgacnaatgcttactgtctggtngcgattggagggtcagagancttctacagtgcctttgaggtgagcntgcagatgccat

SEQ ID NO: 1328 - DNA, 116 bp, Zea mays
  misc_feature: Incyte ID No: 700158509H1
  unsure 6, 85: a, t, c, g, or other
cgtggncgttgttcctacaaattcacttgctctttgtctctctctatatatacacactgtataaaacaagaacacctgtttatcntctcttcttatataaccttttgaacactgtg

SEQ ID NO: 1329 - DNA, 260 bp, Zea mays
  misc_feature: Incyte ID No: 700158512H1
  unsure 124, 210, 217, 242-243, 259: a, t, c, g, or other
gtcacgccctacctctccctccccacgccggccaatcttctactcatcgtggctctagctgctcctcttgccaccacactatcttccaccacagccacctacaatccactcccccatcagccantccgctcgatccggagaccacaatggcgcctgggcttaaagtgcagcaaaatcaaccaaaccatcagaagtgccactaacagaatntgacaanttgagagccgagaatttgatgaggnntaaccagaagttgcana

SEQ ID NO: 1330 - DNA, 262 bp, Zea mays
  misc_feature: Incyte ID No: 700158516H1
aacagtgtctcttttccagttccagacctgaagaaactccgaccggccggtgggcggtggcggcacggcaggatctgtgccgcgatggcgacgtcgaacacggcgcggatggaggacggcggcggcgacctgcggagccaccatcaagaagtggaatatcatctaccctgtctacctcaactccaagaagacggtcgccgagggccgccgcatcgccgctgccaaggcctgcccggaccccacctgcatcgagatcgtgact

SEQ ID NO: 1331 - DNA, 257 bp, Zea mays
  misc_feature: Incyte ID No: 700158519H1
  unsure 60: a, t, c, g, or other
ggtggaagagtggttgggttaagcaagctttctagagtatctgatgtctttgccaagagnttgcaaaaccctcaaagactagctaatgaaatctgtggtgcactgcatgctagcattcaacctgctggtgtggctgttgctctgcagtgctggcacattcctttaccagaaaacttggaatgcaagactttggaaggttggattagaacttcacattcatctcgctctggagtctttgaaggtgaaagcagcacttt

SEQ ID NO: 1332 - DNA, 258 bp, Zea mays
  misc_feature: Incyte ID No: 700158520H1
  unsure 134, 222, 233: a, t, c, g, or other
gagggattcagcactggtgacatcaggtctgctatgcaacaacagcttggtatacccacacaatgacaccaactgcaatctattttgttattaatagaaagaaagaaacagataacagaaatatacgatacaantacttagtttccattctattggaaatgtccgattttgcctgccagtcatttaatgtatgtgtgtggtggtccctgcacgggttatgantgacattcccntggatcccgcactggagattttttg

SEQ ID NO: 1333 - DNA, 256 bp, Zea mays
  misc_feature: Incyte ID No: 700158521H1
  unsure 19, 49, 76-77, 94, 126-127, 136, 144, 149, 174, 177, 189, 194-195, 199,205, 230, 232, 248: a, t, c, g, or other
gttgtaatgacaataccanagttgtagagcactttttaagcttttcagnaaatcctggtttgctatttttggaatnntatttgaagagttatgnttaaaacaagtgactgctgtgctgctgtcctnnaaatctgcntgtgcgcntttgnttgtttagttcacccttctcgctanaantgtttggtttgntcttnngtantgtagncttgccatggttaagctagagatgncntgtgtgtcttgttttntatgttcc

SEQ ID NO: 1334 - DNA, 256 bp, Zea mays
  misc_feature: Incyte ID No: 700158522H1
  unsure 17, 184: a, t, c, g, or other
gtgctggtcgttcagcncgacccgcacgaaccctggttcttgacgggtcgtgctggtcgttcagcgcgtctggagcgctggagggtgcgcactacctcgcaactggcaagctggaggtgctttcggagcagcagttcgtcgactgtgaccacgagtgtgattcatcggagcctgattcatgtgnttcgggttgcaatggtgggctaatgacgacggcattcagttatctccagaaggccggtggccttgagagtga

SEQ ID NO: 1335 - DNA, 256 bp, Zea mays
  misc_feature: Incyte ID No: 700158526H1
ccatgatgcccatggtgtggatgcacccgaggacgttgagaaaatcgaagcactgatgcgaacgagaaacattcagtagaaaacgaagagaaagcaagtgctttgcattgctatcggcgttggcttggtgggatacttttggttgtgctttcccgtcttctgaatagcatgataccaagtgaagttggtgcatcacttcttgaagttttgtgcttgctaaaacgttcagtgattggatatgtcacttgcattagtc

SEQ ID NO: 1336 - DNA, 256 bp, Zea mays
  misc_feature: Incyte ID No: 700158528H1
  unsure 5, 9, 11, 62, 89-90, 127, 141, 144, 148, 161, 171, 179, 188, 198, 204,207-208, 212, 220, 233-235, 239, 243, 255: a, t, c, g, or other
ataangatnangccccgcccccgtcgtcgaagcccgccaagtccggcggtggcaagcagaanaacaagaagtggagcaagggaaagctnnaggagaaggtgaacaacgcggtgctgttcgaccaggntacctacgacaagntgntctntgaggtgcccaantacaagcagntcaccccntccatcctntccgagcgcntcaggntcnntggntccctggntcggagggctatnnngganctgntggcgcgtggcnt

SEQ ID NO: 1337 - DNA, 254 bp, Zea mays
  misc_feature: Incyte ID No: 700158529H1
ccatattcggcgacgccaccgaggtcgccaacgtgccaccgctcaccacgcccaacctcttcgtcagtggcctttcaaggttaacgacagatgagaagctccagggtgcatttgctcctttcgggaggctccttgaagcaaaagtggtgacggatagagtttctgggaggtcaaagggtttcggtttcgtgagatatgccaccatagaagaggccgagagagcgcggcaggagatgaacgccaagttcctggat

SEQ ID NO: 1338 - DNA, 255 bp, Zea mays
  misc_feature: Incyte ID No: 700158531H1
  unsure 158, 165, 174, 176, 226, 238, 253: a, t, c, g, or other
cccggccgccgcgcgatcttgggttagtgtctcttctaagcggagacctgtgagaggagccatcatcatggccgctgttgagactgttgtcctcaaggttgctatgtcatgcgagggttgcgccggggcggtcagaagagtgctctccaagatggaangagttgnaaccttcgncntagacctcaaggagcagaaggtgacagtcaaaggcaatgtcaagcctgangacgtcttccanacggtttccaagtcngg

SEQ ID NO: 1339 - DNA, 256 bp, Zea mays
  misc_feature: Incyte ID No: 700158532H1
  unsure 3, 6, 37, 56, 75, 96, 148, 154, 160, 163, 177, 186-187, 198, 200, 220,234, 238, 240, 247, 252, 255: a, t, c, g, or other
ggncancacacctcttcctcctgcttcctcctcctancacagctagcgcctgctcnccttcgtctgtgatcatgncttgcagcagcggcaagtgcnatgcggctccagctgctcctgcggcagctcatgcaactgcatgtcccctgangtgganaccgcngcngccagcagcatcangaccatggnntcgctgcgccnancaccaaggccagcgccgtcngcttcgaccctggncacngnggacggngttgngtnt

SEQ ID NO: 1340 - DNA, 251 bp, Zea mays
  misc_feature: Incyte ID No: 700158533H1
ctgaagatgaagccatcgaacttgccaacgatacacagtatggtttggctggtgctgtaatttctggtgatcgggagcgctgccagaggttatctgagattgacgctggatgcatctgggtaaactgctcgcaaccctgcttctgccaagctccctggggcgggaacaagcgcagtggatttggacgtgagcttggagaagggggcattgataactacctgagcgtcaagcaagtcacggagtacatctct

SEQ ID NO: 1341 - DNA, 107 bp, Zea mays
  misc_feature: Incyte ID No: 700158535H1
  unsure 6, 30, 36, 50, 67, 79, 94: a, t, c, g, or other
gacaanttactctagcagactagcacgcanactgantcgcgtttagtttngtttttttggccccggntaaaggctgctngcttggttgtagtantggctggctgtgt

SEQ ID NO: 1342 - DNA, 250 bp, Zea mays
  misc_feature: Incyte ID No: 700158537H1
  unsure 76, 133, 148, 160, 171, 183, 219: a, t, c, g, or other
ggcgtagtggtgactaaagagccttgacaatgagcagcataggcacaggttatgatctgtctgtcaccaccttctntcctggatggccgcgtcttccaggtcgagtatgccacaaaagctgtcgacaacagcngtactgttgttgggntcaagtgcaaanatggcattgtnctgggtgtcganaagctggtaacctcagagatgatgctggaggggtcnaatcggaggatccattcagtgcacggcattc

SEQ ID NO: 1343 - DNA, 249 bp, Zea mays
  misc_feature: Incyte ID No: 700158538H1
  unsure 52, 56, 60: a, t, c, g, or other
ggaagccatccgatggacgcctggtaaatagttacaattgtgacttggaagntctnccantgatgcttctgcagcaggttgccagccaagtaatccactggctccacgatgaagcggtggtccttgggatgaacgcgacaatagatttcctgtgcctgtacttggaccttgaccaaggtgaaacactaggcctggtggcacacgttgacccggatgacacctacggctgcgtctcatggtacctcactc

SEQ ID NO: 1344 - DNA, 167 bp, Zea mays
  misc_feature: Incyte ID No: 700158539H1
  unsure 24, 41, 43, 62, 90, 108, 111, 114, 122, 128, 142, 150-152: a, t, c, g, or other
atggccgccaagatcgcctacganaacgccgcctacatcgngnacgtcgtcaacaacgtctngaagttccacttcgtggggttccacaantgctggaacaagttcgtnggngancacacgtngcaggnggtcgtgttcaccnacaatgcnnnggacgctagcgtggt

SEQ ID NO: 1345 - DNA, 251 bp, Zea mays
  misc_feature: Incyte ID No: 700158540H1
  unsure 101: a, t, c, g, or other
caaaaccagaccaccaaacaagtgccagcgccctctcgcagtcgccgcaatggagagcaccttcatcatgatcaagcctgacggcgtccagaggggcctcnttggtgagatcatcagccgttttgagaagaagggcttctacctcaaggccttgaagcttgtcaacgtggagaggtcgtttgccgagaagcactacgccgatctcgcctccaagcccttcttccagggcctcgttgactacatcatctctg

SEQ ID NO: 1346 - DNA, 249 bp, Zea mays
  misc_feature: Incyte ID No: 700158541H1
  unsure 12, 127: a, t, c, g, or other
cgaaggcgatgncgacagcgctgaaccgcgggctccgcctcctcgccgccggcgccgaggcgtccaagccagcttctcgtggattccatgccaccggcgtgaagagaatgggagggcatggccatgntgagccatactacatccatgccaagcacatgtataacttgcacaggatgaagcatcagggtttgaaggtgacactctccgtgctgggagcggttggcatcggtgttggagtccctgtgtatg

SEQ ID NO: 1347 - DNA, 247 bp, Zea mays
  misc_feature: Incyte ID No: 700158542H1
  unsure 65, 78, 95, 101, 110, 172, 205, 217, 231, 241: a, t, c, g, or other
gcgacgggctggctccggcatcgaacgccgccgtcctatcggcgctcccaccgccgacgtccaangtgccgacgctgntgtccttcctggcgaanatcaanctggacgtnactgacctggtggcgctgtcgggcaggcacacggtgggcatcgcgcactgcggctccttcgncaaccggctgttcccgacgcagacccgacgctnaacaattcttcncggggcagctgtancggacctgcncgacca

SEQ ID NO: 1348 - DNA, 210 bp, Zea mays
  misc_feature: Incyte ID No: 700158543H1
  unsure 50, 62, 180, 204: a, t, c, g, or other
tccaagcgcccccgcgagccagctccggcgaagtcgacagcaccaagcanggcggacacganggcgtcacccgcggtgacgtgccgcacgcgcaagttcatgaccaaccgcctcctctcccgcaagcagttcgtgctcgaggttctccaccccggccgcgccaacgtctctaaggcggantcaaggagaggtggctaagatgtncgaggt

SEQ ID NO: 1349 - DNA, 248 bp, Zea mays
  misc_feature: Incyte ID No: 700158544H1
  unsure 41, 91, 135, 187, 210, 223-224, 229-230, 236, 238, 244: a, t, c, g, or other
gctccagcagattttcgtttcccaacaacgaatcaaacgangcactgtttcacactctatgttgaataccacaggtgtgtggctgcaaaangtgaggacgcacctgagtgtgataagtttgccaagtactatcgntccctgtgcccaggtgaatgggttgaactgtggaacgagcagcgtgaaaatngcaccttccctggacctctgtantcctacaatgcannaaacnnttatgnantcactntgtt

SEQ ID NO: 1350 - DNA, 247 bp, Zea mays
  misc_feature: Incyte ID No: 700158545H1
  unsure 52, 112: a, t, c, g, or other
gatgagactgagtatactgtgcttgcacacataatcacgacaagtctgcacnttgccgagatgatggctattgctgctccagaggagttggttcatctgaagaagttcctanttgatttcctggagccatttgcgctgaaacttggctgggatgctaagagtgacgagggccatctgaacgctttgttaagaggtacactcttaaccgctctggcagaacttggccatgaggctaccataaatgaag

SEQ ID NO: 1351 - DNA, 248 bp, Zea mays
  misc_feature: Incyte ID No: 700158546H1
gtccgtgtgaggcgtggtggcaggaagaggcctgtgccgaagggtattgtctatggcaagcccaagcaccagggtatcacccagctcaagttccagaggaacaagagatctgttgctgaggaacgggctggacgaaagcttggtggactcagggttctcaactcctactgggtgaatgaggatagcacctacaagtactttgagatcatcctggttgatgtggcccacactgccatccgcaacgaccc

SEQ ID NO: 1352 - DNA, 249 bp, Zea mays
  misc_feature: Incyte ID No: 700158547H1
ggcttgatcgatctctcgacagcaaatagctagcaataatggagaagtacaccaaagccctagcgtcattgctcaccatgctggtgctggcacctctcctcgccatggccaccgacccagaccccctgcaggacttctgcgtcgccgacctcaacggcaagccatcagtgaacgggtacccatgccagccgccgtcgtcggccggcgaccagttcctcttctcgaccaagatcgccacgggaggcgacc

SEQ ID NO: 1353 - DNA, 267 bp, Zea mays
  misc_feature: Incyte ID No: 700158549H1
  unsure 55, 82, 165-166, 242: a, t, c, g, or other
tgtgcttgaagcctgcaaggacagcctgaagaagctgcagctagactatctcganctctacctcatccacttcccagtagcnactcggcacaccggagttggcacgacttctagcgctctgggtgacgatggcgtgctggacatcgacaccactatctccctggnnacgacatggcacgcgatggaagagcttgtttccatggggctggtgcgcacattggaatcagcaactacgacatctntcctcaccagagactgcctggccta

SEQ ID NO: 1354 - DNA, 138 bp, Zea mays
  misc_feature: Incyte ID No: 700158550H1
  unsure 4, 7: a, t, c, g, or other
gtgntanataaaaaggtttgtagttgcgtgcgcgccgtgtattccttggtgtactggtgctggcggtaaccacttattaccagggatccttgtaatttttcctgttggtttcccaataataatgtgaatatattggtc

SEQ ID NO: 1355 - DNA, 84 bp, Zea mays
  misc_feature: Incyte ID No: 700158552H1
gaaactgcaagtaaacaaaaactgaaaaactaaaaagaaaaaaaacctctggatgtcatgtaaataagtgtactttgtatgttc

SEQ ID NO: 1356 - DNA, 262 bp, Zea mays
  misc_feature: Incyte ID No: 700158554H1
  unsure 10, 17, 30, 38, 61-63, 66, 97, 111, 115, 135, 141, 154, 159, 178, 190,204, 230, 238, 249, 257: a, t, c, g, or other
ggagtatgtnggcggcngcgactccccatncgtcaccntgtactaccacagcttcgacggnnngcnaggtttccccgggaacctcgacgcgtacgtnacgtaccgggtgtngggnccgtacacgctgggcgtgcncatgancgcgacggcgctngacanggcgacgccggtgaacctnctgctgcacgcntactggaacctggncgggcagggcagcggggacgtcctgngccacganctccggctgcncgcgtcgnggtac

SEQ ID NO: 1357 - DNA, 145 bp, Zea mays
  misc_feature: Incyte ID No: 700158555H1
gcggcttccactacttcaccttcccgtcgctcgtgggccacacgctgccctacgcgtgggtcgggcacagcggcgggcgctgcgctgacgtctgcgcgtacccgttcgcgctgccgtcgtacatggcccgaagcggcatggcggc

SEQ ID NO: 1358 - DNA, 259 bp, Zea mays
  misc_feature: Incyte ID No: 700158556H1
ctaggctgtgcatacagtatccacagctataccaagaaggagtgcaaaatatattattcagttggcgtcggatacttggctggatgtttaatggtgttatgaatgctgtcttaatctttttcttctgcatcactgccttcgaggaccaggcattccgtcgcgacggtcaagttgcgggcttggatgctcttggtgtcgtcatgtacacttgtattgtatgggttgttaactgtcaaatggcgctctctgtgaactactt

SEQ ID NO: 1359 - DNA, 259 bp, Zea mays
  misc_feature: Incyte ID No: 700158557H1
gcaccagatcgtcaccgtcgactgccagccgtcggggccccagggaggcatgctcgtcttcgtctccggttccatccgcaccggccccgaggagcaccccatcaagttctctcaggcattccatttgctgccggcagctgggtccttcttcgtgcagaatgacatgttccgcctgaactatggctaaaagacagccgaaaactcttgtgatgaacgaatttgttaagggcttcatgttgagacgatgaataccgactgt

SEQ ID NO: 1360 - DNA, 260 bp, Zea mays
  misc_feature: Incyte ID No: 700158558H1
gggtggtggtgacgaggaccgagattgacatgcaatatatcaaggcagagtacttgaagaagtacaagaagccattagctgaggctatcaactccgagacatcaggaaactatcggacgttccttctttcacttgttggtcatggccattaggctatgtttcgaccatgggacatgatatttctatcgatccaccctaaatgcagagacctacctggaaaacttatgatgttgccatttatctgtcgtgactcttggatc

SEQ ID NO: 1361 - DNA, 261 bp, Zea mays
  misc_feature: Incyte ID No: 700158559H1
ccaccccgcaggcgggagccaggcggcggcaggaggaggcgcgacgcagcggacgcagtatccgtatgtgactggtaattcagtcattgccttgaaatacaaggatggtgtgatcatggcatgtgacactggagcctcttatggatcaactttgagatacaagagtgtggaacgcattaaggcagttggcaagcatagcatcattggagcaagcggagagttcagtgacttccaggagattttgcgctatttggatgaact

SEQ ID NO: 1362 - DNA, 260 bp, Zea mays
  misc_feature: Incyte ID No: 700158560H1
  unsure 242, 251: a, t, c, g, or other
ataatgtttttttaatagaaaaaaaataaaataacagaaaaaggcgcacaacaaccatctgcatctagaacgatgccatccatgtctttgccatctctagattacatgtacctgatttctagaatttccatcttatcgttgccctgtagtagcaagtaacctgtacttcatttggcttcaatttgctgatggagacaggttccctgtctcaactgctagagaaaaagtaggcagatatggtngtaattaanacagaaggc

SEQ ID NO: 1363 - DNA, 189 bp, Zea mays
  misc_feature: Incyte ID No: 700158564H1
  unsure 139-140, 181, 184: a, t, c, g, or other
gcggcaagccctcactgccatgtccggagcggcgcccgacgccgagcccggccgagagggcttcacctgcagcgcgctgctcatgtgcctctacctgccgggcctcctctccaagaagaaaccggagaaggcgattcannacgagcccgccgccgacagcacacgcggcaacgggcacggnacnagcaa

SEQ ID NO: 1364 - DNA, 257 bp, Zea mays
  misc_feature: Incyte ID No: 700158566H1
gggttcttcattgattgctgctggtggctctgatcccgtgttgagggtatgggaccctcgcaaaccgggaacattagcgcctgtttttcaattctcctctcattcaagctggatcactgcttgtaaatggcatccgagttcttgtttccatttggtgtcttcttcttttgacgggaaagtgatgttgtgggatctaaggacagcatggccgctggcgtctgtggactcgcatgaagataaggttttatgtgcggact

SEQ ID NO: 1365 - DNA, 256 bp, Zea mays
  misc_feature: Incyte ID No: 700158567H1
gattgttggtttcagcttggcgcattcagagctgtcaacagttttctatgagaagttgctgttacttgcctgggggtaagcacttgatgctactctgacaaaccccgcagccagttttcaatatgttgtctgctgctttttctttgtacttgcatgatgagaaaaatttaatgatcactactaagattgcttactctgctgttcataggtatgacagtcttatcgtgaagtttgtggggcttatagttttttcttt

SEQ ID NO: 1366 - DNA, 257 bp, Zea mays
  misc_feature: Incyte ID No: 700158568H1
gcgcaaatgtcgacaaggcggaagaagaaaaaagaaaggcccgagctgcccggtttgcagaagcgtctggtggatcagcagctcgggaaaacggcaaagacagctccaagccggacgcagccgctgttaccggcacagcttgatttgagcactctgccttggacgaggtctcagatatattgtctcctaggagactttggtgaagccatagcttttgtacaccactaaccgcatggacgggggcgtcctgtgtttcc

SEQ ID NO: 1367 - DNA, 238 bp, Zea mays
  misc_feature: Incyte ID No: 700158574H1
  unsure 14, 31, 41, 50, 52, 55, 64, 80, 84, 124, 135, 153, 195, 203, 222, 231: a, t, c, g, or other
cgtccacctcgcancagcaagcaagcgcgancaaatggcgnctctaggananggnggagtgctnccgcggcggcgtccancaanctggtggtgtcgttcggcgagatgctgatcgacttcgtcnccgacgtggcngggctgtcgctggccgantcgggcggcttcgtcaaggcaccctgcggcgcgcccgccaangtcgcctncgccatcgccaagctcggnggatcctcngccttcg

SEQ ID NO: 1368 - DNA, 256 bp, Zea mays
  misc_feature: Incyte ID No: 700158575H1
  unsure 98, 197, 202-205, 208-210, 214, 216, 221, 223-224, 226-227, 229,231-232, 234-236, 242, 244, 246, 248, 250, 254: a, t, c, g, or other
tgtcacgcttgatgtcttctctgcaaatgttctatgcacttgtaattttaccgtgaatgacgaactgttagccattgacatcatctattttgtatttnaggggggttgtttcttcttgccagtcctaccattttcatgtagctctgtttaatcatgatgctttactcaaatatatgtaagatttggttgtgccaaanaaaannnnaannnaaanangaaananngnnangnnannnaacgananananangggngg

SEQ ID NO: 1369 - DNA, 196 bp, Zea mays
  misc_feature: Incyte ID No: 700158577H1
  unsure 3, 26, 41, 44, 62, 69, 78, 80, 87, 102, 116, 141, 154-155, 165, 168,182, 185, 188, 194: a, t, c, g, or other
ggnaaccgatcgaatccgccaaccanacaatggcgtccganggnagtggcgtggtgacggtntacggcnacaacggcncngcgctgntggagccgccgaagnagcccaagtcgtcnactttctccgtgaaggtgggcctgncgcagatgctccnnggcggtgtgntcntggacgtggtgacnccngancaggcncg

SEQ ID NO: 1370 - DNA, 255 bp, Zea mays
  misc_feature: Incyte ID No: 700158578H1
agaatcccttgaagaaaccgaaacagacggtgcttcttgtaaccctgcagcaactggtggatgctgccaaggcaatggtggcttcactcgagcttcggagcagcagaagcaagctctcgagcttcggagcatgacaaatggtggcaaagaatcccttgaagaaaccgaaacagacggtggtgcttgtaaccctgcagcaactggtggatgctgccaaggcaatggtggcttcacttgctgccatcctgacctgcc

SEQ ID NO: 1371 - DNA, 258 bp, Zea mays
  misc_feature: Incyte ID No: 700158579H1
  unsure 35: a, t, c, g, or other
gcggctcagggaagagcaccgtcattgctctcatncgagcggttctacgacccgtgcggagggaaagtggccatcgatggcaaggacatccggacgctgaacttgaagtccctgcggcgcaagatcggcctggtgcagcaggagccagtcctcttcgcgtcgagcatcctggaaaacatcgcgtacggcaaggaaggcgcgagcgaggaggaggtggtcgaggcggcgaagacggcgaacgtgcacggcttcgtgagc

SEQ ID NO: 1372 - DNA, 182 bp, Zea mays
  misc_feature: Incyte ID No: 700158580H1
ggaaagcctgagtgggaggacactatctagtgccaatactacagctattggtcccgcttctgcaggaggcgcaaaagccaactctagttggaagctaaagtctgttgttactcttgcattgacattgctaacaagttctcaggcaatattaattgtgtggtcaaaaagagctggaaaatatg

SEQ ID NO: 1373 - DNA, 252 bp, Zea mays
  misc_feature: Incyte ID No: 700158582H1
acgaggcctatgatcgatgtaaacaggttttgctgtgtctgatgatgaagtgtcgacctctgaaggtcctgctcctttcgagaccgagccccctggtgctggtgattgcgatggtcttgctggagatggtggagcacgaacatgggatcctgcaggtcccggagatgcttttgacaagtcattacccccccccccccttagaccagcattggtaatagagggaggagtaacacacttctgtacaactggtcc

SEQ ID NO: 1374 - DNA, 251 bp, Zea mays
  misc_feature: Incyte ID No: 700158584H1
  unsure 19, 51, 187, 229, 242: a, t, c, g, or other
ggaacctcaggcgtgaganaagctattcacggtctccatccccacgccgangacggggccgcagccggagctacagcagaagccggagctatagccgatccagatccccgtctggatctcctaggggtggacgccgagaccgtgatgagaggagatcaaggagtcttagctacagcaggagcgcaanccctaggcgttctgtgtcacctgtaaaggaaaaggagcgcancgcacacctgatngcagtaggg

SEQ ID NO: 1375 - DNA, 252 bp, Zea mays
  misc_feature: Incyte ID No: 700158585H1
  unsure 86, 88: a, t, c, g, or other
cctccttcccgtccatcgccgtcgccggggcttcctacaacttcaaaatggcggctaccgccaccgccatggctatagcaactatntnccccgccgctccgattccatccgcgcccttcccatcccttcccctccccctcggcctccgcctccgctctcaacccctcctcttcgctgcttcccgccgccgcttcctccatgttcccaaagccgcctcctgggacgaatccgtccccgaggatggtggagatg

SEQ ID NO: 1376 - DNA, 254 bp, Zea mays
  misc_feature: Incyte ID No: 700158586H1
  unsure 15: a, t, c, g, or other
gccaaaaccctagcnccgccgccgcgaatcccgcacgaccccaaccatgaccgtgctgagccgccctaccccgggcacggcccagtgcttcgggcggaagaagaccgccgtcgcggttgcgtacacgaagccggggcgcggcctgatcaaggtgaacggcgtcccgattgagctgatccgaccggagatgctccgcctcaaggccttcgagcccatcctgctggcggggcggtcccggttcaaggacatcgaca

SEQ ID NO: 1377 - DNA, 251 bp, Zea mays
  misc_feature: Incyte ID No: 700158588H1
  unsure 47, 178, 195, 218, 223, 239, 250: a, t, c, g, or other
cacagacgagacgacagagatgaaggacggaacgtcgtcggggggangggcgttcgctgcgggcagcgatccaaggcagccgtcgacggcgaacattacgcgccgccgaagctgtcgccccaggacctacccatcgactatgcaggcttcctcgccgtcgtcttcggcgtcctcggcntcatgctccgctacaangtgtgctcgtggatcgcaatcancttcngcgctcagtcgttggnaaacatgaagna

SEQ ID NO: 1378 - DNA, 255 bp, Zea mays
  misc_feature: Incyte ID No: 700158590H1
  unsure 132: a, t, c, g, or other
agcgaggcgacgccgagggcacctcatctccggcgaagggaaatggcgaccgttccaggggatctgatctggcagattgtgaggaagaacaactccttcctggtgaagcagtttggcaacggcaatgccaangtgcagttcaccaaggagcccaacaacctctacaatttacactcctacaagtactctggcttagcaaacaagaaaactgtaacgatccagccagctgctggaaaggactcggctgtggtcctc

SEQ ID NO: 1379 - DNA, 252 bp, Zea mays
  misc_feature: Incyte ID No: 700158592H1
gagcacacaagaatgtcgttcgtgcagctctctggtgctggagtcgctgcagtggccttcacgaacaagagcctagtctctcggcacgcagcgctacgggtctgctcgtcgaggcgctcgatccgtagcctggtcgttaaggctgcaactgtcgtcaccccaaagtacacttcactgaagcctctgggagatagggtgcttgtgaagcttggtgccgcagaggagaagacagttggtggcattttgcttcca

SEQ ID NO: 1380 - DNA, 250 bp, Zea mays
  misc_feature: Incyte ID No: 700158594H1
  unsure 6, 41, 49, 86, 129, 137, 211-212, 246: a, t, c, g, or other
cccagntattgcacagcttgctgggttcacccgtccaatcntgcacggnctctgcaccctaggattcgctgctcgcgccgtcatanaatctttctgcaacggcgaaccgactgcggtgaagagcatctncggccgtntccttctgcacgtctaccccggggaaacgttgtccactgagatgtggcttgacggccagaaggtgcactaccanncgaaggccaaggagcggaaccgagctgtcctctntgga

SEQ ID NO: 1381 - DNA, 255 bp, Zea mays
  misc_feature: Incyte ID No: 700158596H1
  unsure 116, 186, 208, 220, 244, 246, 249-250: a, t, c, g, or other
gcgaccgtctgctccggatcaccggcgtcatcgagcatggcatgtttcttggcatggccactacagtcatcgtcgctaacaaggacggcaccgtcacagtcatcaacaagaagtantaatctacaagtagcctgtatgtgtgcgtccgtgtgtgatccagctacctaagttctgctcgttaccgtngtgaaaccatcattttgttttntcatctcatatntttcctactggtgattccaatatntntgnnggggg

SEQ ID NO: 1382 - DNA, 276 bp, Zea mays
  misc_feature: Incyte ID No: 700158601H1
  unsure 25-26, 79, 154, 231, 274: a, t, c, g, or other
ggaattaactaaagtaattccaacnncatttgaggccatgcaaacgtacccaattaaactatagctcttccaacggcancgccgaagtttggaaccatattctttgtcgatggcatggcctcaaatgctgttggaattaactaaagtaattttnaaatgcaattgttaaatggccacgatggtgtatgtattttgtacactagctcattccaaaggtcgttatgttgctgnggccacatcactttggtcaagtggaataatattaataagaacnag

SEQ ID NO: 1383 - DNA, 272 bp, Zea mays
  misc_feature: Incyte ID No: 700158602H1
  unsure 2, 21, 109, 159, 197: a, t, c, g, or other
cngccatctagtggctgggantccgggtggtcgacagggcatgctgcggatcgggaaaactgaacgccgcggtcatgtgcgcccagccaaacacgacttactgttcggntcgcgacgactacatgttctgggacatgctacatcctacgcaggcaacanatgaacgtggggtggtcgccatcttctacggcccgcangagtacgcggatcccatcaactttgcacagttggccgctgccacagcaactgatgatgatgatataaatactgct

SEQ ID NO: 1384 - DNA, 271 bp, Zea mays
  misc_feature: Incyte ID No: 700158603H1
gcgggggtgaaactgtctgctaccattgcttccatggcaactaatgagaacctcccgccaaatgtcatcaagcaattggctaaagaactgaagaaccttgatgagtcacctccagaagggattaatgtgattgtcaatgatgatgacttcactactatttttgctgacattgaaggccctgctggaactccatatgagaacggagtattcaggatgaagctattattgtcacgcgatttccctcaatctcccccaaaaagggtcttcttga

SEQ ID NO: 1385 - DNA, 236 bp, Zea mays
  misc_feature: Incyte ID No: 700158604H1
  unsure 62, 110, 121, 186: a, t, c, g, or other
gcgaccaacgcggacagcacgccggctgctgtggcaggtgacctgccactacagcgcctgtnactgccgcacttgcccgacatatggctgggcgtgctgcagcacttgcngctagctagcnagctagctagctagtgtgagttcttccgcgcgcgcgcgcggcagcctttgcatacccctcttgcntagctcatgtccagtagtagccggttgctgccctcgtcgtcggcggcgtg

SEQ ID NO: 1386 - DNA, 216 bp, Zea mays
  misc_feature: Incyte ID No: 700158605H1
cccgtcgttctggaagtttccacgctccgcgcctccgccccctggtctgagtggtctccgctccaatggcgccctcactcctcgccgccatgtccacctcgcccttcctagccagcagcggcagcagccgcaaggcgctaggcgctgcccacacccgacgggctggactgcgcgtggccggttaagtacgaccctgccaagtggcgccgcagaacg

SEQ ID NO: 1387 - DNA, 265 bp, Zea mays
  misc_feature: Incyte ID No: 700158607H1
  unsure 58: a, t, c, g, or other
caactccaaggaggattgctggctcatcatcggcggcaaggtgtatgatgtgacgaanttttggtagaccacccaggaggtgatgatgttctgttgtcctcaactggcaaggatgcgactgatgatttcgaggatgtcggtcacagcaacactgcccgcgcgatgatggatgagtacttggtgggtgaaatcgacgcgtcgacgatcccttccaggacgaatatgtccccccgaaacaaccgcactacaaccaggacaagactcc

SEQ ID NO: 1388 - DNA, 268 bp, Zea mays
  misc_feature: Incyte ID No: 700158608H1
  unsure 77, 166: a, t, c, g, or other
acgacgggttgacgaccttcaaggtgtacttccacgacgtcgtggcggggacgaacccgacggcggtgcgcatcgcnaggacggcgtcctccaacacgtcgtccaccaacttcggcgcggtggtggccatcgacgacccgctgacgacgggtcccacgcgcgccgnggcacggaggtgggccgcgcccagggcacctacacgttcgcggaccagcagacgttcgggctcctcatggtcatgaacttcgtgttcacggccggcgagcac

SEQ ID NO: 1389 - DNA, 264 bp, Zea mays
  misc_feature: Incyte ID No: 700158609H1
  unsure 24, 57, 84, 124, 181, 244: a, t, c, g, or other
ggcgatggaccagcagggtgcggncggggacgcggaggtgccggcggggctgggtcngacggcggcggagtacgagcagctgcngtcgacggtggacgcgcaccaccgctacgccgtggggganggtcaatgctcctcgctgctggcgcacgcatccacgcgccgccggaggcgtctgggncgtcgtccgccgcttcgactgcccgcagtgtacaagcattcatccggagctgcgcgctccgcncagaccccgaagccggcgac

SEQ ID NO: 1390 - DNA, 258 bp, Zea mays
  misc_feature: Incyte ID No: 700158610H1
  unsure 252: a, t, c, g, or other
ggaaggagtctgaatactctggccattctattcctgttggtggtcttgcttactatgtaactgccccatcaagtttggctgatgtccttgcaaatccattccatgcactgttttatgtggtcttcatgctgtcagcctgtgctctgttctcaaagacatggattgaagtttctggttcatcagcaaaggatgttgctaagcagctcaaggaacaacaaatggtgatgcagccacgtgagcgattgcagaganttaacg

SEQ ID NO: 1391 - DNA, 268 bp, Zea mays
  misc_feature: Incyte ID No: 700158611H1
  unsure 84-85, 177, 199: a, t, c, g, or other
agatcgagcagtcatcgatctgatggggggcgaccagcagctcgttccggcggcggcccgcgtcaccccgcgtcggccgatganntccttccgggtgccgcggagactggtggccagcagagcggcgggtggagcgtcgccgtcgccgccggtgccggtgccggcggggctaaaganaaagaagaagaaggtggcggtngcgaggctcggtgggaagaggaggctcttcggcgcgatccggcggctccggatgcggtggctggccgtg

SEQ ID NO: 1392 - DNA, 270 bp, Zea mays
  misc_feature: Incyte ID No: 700158612H1
gtctcaagtatgctcacagagcttgcgtgcaacgtgagtggcaacgagaaaggagacactacttgtgaaatttgtcatgaggaatacaagccaggttacactgcgccacctcgtgttcagccagatgagacaaccatagacattgatggtgatttggttatggatttgcgagacccaaggattcttgctgtagcagctgcccaacatcgtcttcttgaggcagagtatgatggttacgctagtacagatgctagtggtgctgcattctgc

SEQ ID NO: 1393 - DNA, 269 bp, Zea mays
  misc_feature: Incyte ID No: 700158613H1
  unsure 203: a, t, c, g, or other
gacaaaggaacactggattctcttatgtgtggtcaaaattcccaagagaatgcaacgaaaatgctagaggaggtcaacagaatcctcaaggaaaatggtgtctacatgctgatcacttatggggatccaagttaccgcttgcgtctcttgaaggacatggaaaaatggacagtaaagctccatgtcatagaaagatgggaganaagttcgaatcagaacaaatgggaactgacaaagccattgcctctagaggaccatagcacatcact

SEQ ID NO: 1394 - DNA, 268 bp, Zea mays
  misc_feature: Incyte ID No: 700158614H1
  unsure 57, 60: a, t, c, g, or other
ggcggctcacggctcccgctgcggacaacctgatccatgggggaggcctgaggccgnagngcccggccgtgggcgcagcgcaccttcaaccaggcctggctaccaaggcgcggcgagctcagaaggggcagcctgtctccacccgtcggggacccgctcagcagggagtggcccaagcgaaagatggcaggggagatggtgcttgtgggccggatgtggcattcatgggctggcggactgaagcggctgggtggtgacgggctgaaag

SEQ ID NO: 1395 - DNA, 270 bp, Zea mays
  misc_feature: Incyte ID No: 700158615H1
  unsure 19, 48, 112, 167, 204: a, t, c, g, or other
ggttgatgcgcggaaaggnaagaagaatgccagccaaatcgaaaatanccaccaagtgcgtttattgcacaatagacatttacagtggctctttataaatgcttatgcagangatgctttatcttttcaaaaggctactgttgagaataccatgtataatgtttggnggaatactgtaaacctgcgggattctgttaatatganaagaataatggtgcaacacttccaacaagaactcaggctttacaacattctgaaagagcagattgc

SEQ ID NO: 1396 - DNA, 272 bp, Zea mays
  misc_feature: Incyte ID No: 700158616H1
  unsure 10, 114: a, t, c, g, or other
ctgctcgtancagcttgtgcgcaacatcacgggcaaccccgaggtgcgggtgaccaaggagaagagggcggccggcgtcctggacaaccacgacgagggcgagaggtacgccangcacggcctcaggaagttcgtccgcgggaagaagcccgagatcatggcttccatcaactccttcttcgccgaccctcccaaggacgattaagctagattccgtcatggatggatgagtatgttttaccaatcattagctgccgggggcgcgccttgat

SEQ ID NO: 1397 - DNA, 249 bp, Zea mays
  misc_feature: Incyte ID No: 700158622H1
  unsure 203, 207, 212, 244: a, t, c, g, or other
cagacagagagatggagcggatgagctcgtcggtgcagtcctgggtggaggaacacaagctctcgtccatcggagccgtgtgggcgacggcggtgggcgcgtcggtggcgtacagccggcggagggcgccggcgcgggccacgagcctgcgcctcatccacgccaggatgcacgcccaggcgctcacgctcgccgtgctcggngganccgcnctcgcgcaccgctattacggcagcagcgagangaggc

SEQ ID NO: 1398 - DNA, 262 bp, Zea mays
  misc_feature: Incyte ID No: 700158623H1
atgctacgaacaatggcatccctgtgctcgtatttcccaagtccaagtctgcgcccgaggggatttcggttgctcaactgctggatactctgaggggaaacaatgtagactttgttcttcttgccggttacctgaagcttatacccactgaattgatccaggaatacccaaaatccatattaaatatccacccttctctccttccggcattcggagggaaaggtttctatggttcaaaggtgcataaagctgttattgcctc

SEQ ID NO: 1399 - DNA, 263 bp, Zea mays
  misc_feature: Incyte ID No: 700158624H1
gctcccttggatgagaagattgagttttcattccaactttatgacctcaagcaacaaggcttcattgaaagacaggaggtaaagcaaatggttgttgctacacttgcggagtcaggaatgaatcttttagatgaggtcatagagagcatcattgataagacttttgaggaggcagacacaaagcatgatgggaaaattgaccaagaagaatggcgcaatttagtagtgaggcatccctctttattgaagaacatgacactaca

SEQ ID NO: 1400 - DNA, 264 bp, Zea mays
  misc_feature: Incyte ID No: 700158626H1
  unsure 174: a, t, c, g, or other
gactctccgtggtttatatccggtggagactatttcaacagtgggcagaatttgtgctgaggcagagaaggtatttaaccaagatttatactacaagcggactgtgaagtatgtgggagaacctatgacccacttggagtctattgcttcttcagcagtgcgagctgcaatcanagttaaggcatcagtcatcatttgcttcacctcttctggacgagctgcaaggctcattgctaagtacaggcccagcatgcctgttctatc

SEQ ID NO: 1401 - DNA, 264 bp, Zea mays
  misc_feature: Incyte ID No: 700158627H1
  unsure 125, 247: a, t, c, g, or other
gtagaggtttggccacgcgtaacctggagcccacggtggggtctcaccttcaagagtgtcaaggagaaagtgcacgggaactcttcagtttctcagaggtcagctttggtcatcaatggtcagancgtcttccttgaaggcctctcgttggacggcactcttgttgtcaacgccgtcgatgaagcagaggttaaacttaccggtcatatacagaataaaggctggactatccagcatgtcgactacnaggacacctcggagaag

SEQ ID NO: 1402 - DNA, 250 bp, Zea mays
  misc_feature: Incyte ID No: 700158629H1
  unsure 52-53, 55, 146, 158-159, 176, 189, 206-207, 216, 243: a, t, c, g, or other
ataatatgccaaccatctcactccggtccggtccggagcggttgaagcgaanngnagtcaactaccgccgccctctctctagtccagatttccagcggtccagaccgagagcacggctccctacacgacatcatcatggacgccgncccgctcctcgnnctcctcctcgcggccgngtccctctccgcngcggcggcgggcgacgnngcgcacccnggctactccgacgagggcacctgcacngtggacg

SEQ ID NO: 1403 - DNA, 72 bp, Zea mays
  misc_feature: Incyte ID No: 700158630H1
gtccgccatgtttgtgatggagaacttaagctttgtttgttatactgattatgagttacctgtgctttgctt

SEQ ID NO: 1404 - DNA, 266 bp, Zea mays
  misc_feature: Incyte ID No: 700158632H1
  unsure 169, 176, 178, 192, 198, 209, 249: a, t, c, g, or other
ccaaggtccacgctgctcctggcggtggctcttccctgggctacctgttcggtggcaactgatgcccgtgctggtgcgctcaccaaagttatcctcccctgcctgctgcgtgctatgtctgaatcgtgaacaaccgttgtcatttcatgtgtgtaacccgtgcaatgcnttgtgcncntggttgatttctcngtgggnaacttcccgtnctgcatggggttgtaagctgtctctaaatttcacggcaantcgtgtgcctgaacttc

SEQ ID NO: 1405 - DNA, 258 bp, Zea mays
  misc_feature: Incyte ID No: 700158636H1
  unsure 119, 182, 185, 214, 257: a, t, c, g, or other
gtctcgcggtcgcggccacgctgagggagagcgagaagagacagacacagatcgcgcgcggagatgtcgtacggactcgtcgtcgtgggcgcgcgccctggttgcagatctcgccctanaccttctccgcaatcggtatcgccgtctccatcggcgtctccgtcctcggcgcggcattgggnatnttcatcacggggagcagcctcatcgggcngccatcaaggcgcccaagatcattctaagaacctcatcatgtng

SEQ ID NO: 1406 - DNA, 112 bp, Zea mays
  misc_feature: Incyte ID No: 700158637H1
  unsure 77, 106, 108: a, t, c, g, or other
gtctgatgtctaaataatggaacgagtccttttgttgagtttgagttgtggaactttcaaagcgtgcgttgcatgcnggcgcttgtgccggcaaacatggcaaaananaaaa

SEQ ID NO: 1407 - DNA, 256 bp, Zea mays
  misc_feature: Incyte ID No: 700158638H1
  unsure 108, 136, 187, 240, 243: a, t, c, g, or other
cattggacttgcactggtgcttgctcataattactagttcatcagcaaacaacaaacaatggcaccgaggctagcgtgcctcctagctctggccatggcagccatcgncgtggcgccgtgcacggcccagaactcnccgcaggactacgtggacccgcacaacgcggcgcgcgccgacgtgggcgtngggccagtgtcctgggacgacaccgtggccgcgtacggcagagctacgcggcncangccagggcgactg

SEQ ID NO: 1408 - DNA, 104 bp, Zea mays
  misc_feature: Incyte ID No: 700158641H1
  unsure 19, 51, 86, 91, 95: a, t, c, g, or other
ggttttgttccgcactcancagtaagtgaagttttgtaattcctggatganaacctacccggattggctgtagcatgttgtgagangaganggcnattttgtca

SEQ ID NO: 1409 - DNA, 257 bp, Zea mays
  misc_feature: Incyte ID No: 700158643H1
agatccaagtaggcagatcgagatggattgtggacctgatgacatgcgtgggtacatacatttcttcggatgcgttggtgtgcctgtggagagatgtcaacctgccatggtgtcacggtccgccatcagttgaacgtcttgcctgcacttcagtaggccatttttcatggttctagttgtatttgaatccagcgtttgccactaagataaatcagacattcgttttgtgaacctattatgatggactttatttgctg

SEQ ID NO: 1410 - DNA, 260 bp, Zea mays
  misc_feature: Incyte ID No: 700158647H1
  unsure 51, 55, 61, 115, 127, 137, 160, 197, 247, 252, 258: a, t, c, g, or other
gggtgccagagtatggatggacaacgcagaaggtgttccattttctaaacntccntgtgancggcgtgcggtctgtcgtgtttgtgctgcggcgaaatgtgcaacttgtagagcntgagataatacnacatgtgctnctggatatgcccgggcttgcatncttcacgacatatgcacttttagtgctcttctgggcngagatttattatcaggcacgtgcaatgtcgactgatgtgcttagaccaantttcnattggntc

SEQ ID NO: 1411 - DNA, 262 bp, Zea mays
  misc_feature: Incyte ID No: 700158648H1
atacacactgatttaaagcctgagaacattctccttgtttctccggagtacattaaagtgcctgattacaaagtttcatcccgatccccaaaggagggatcctattacaagcgggtgcccaagtctagtgctatcaaggtgattgattttggtagcactactatgatcaacaggatcagagttatattgtgtcgacgaggcattatcgggctccagaagttatactgggacttggatggagttacccatgtgataactggag

SEQ ID NO: 1412 - DNA, 265 bp, Zea mays
  misc_feature: Incyte ID No: 700158649H1
  unsure 50, 77, 101, 199, 214, 219, 226, 231, 235, 237, 245, 248, 261: a, t, c, g, or other
tgtgtctgtaaggctagctgcagctgggtttaacgtcaccaacgaaagantatgaatatcattttcatgcctaagangtgaagctgcagtgcgctagagcnatcgtgctcgtggcaagatgaactattcttctgtgatgatggaacctaacccgttccctgtattcaagggagagtcaaaataatactccaaagttcangtactcgggaatcgnatttnggaccanttggncaangnagtctcgnatngtgccctttttgntcta

SEQ ID NO: 1413 - DNA, 229 bp, Zea mays
  misc_feature: Incyte ID No: 700158651H1
  unsure 209, 214, 216-218, 221: a, t, c, g, or other
acagcatgcaatggctccaagaacagcatcccccccaagcgcgtccggctgtccagaggagaggaggaagaagattggagtagctagcagctagggtgctccggtctttgtttgtttgctgcacgtgtaattgtgtatgcaggatcttctatcaaggtcgatccgattagatgcaggcaaaaaaaaaagagctgggatccagtcgacanaaaanannnagnaaaaaaaa

SEQ ID NO: 1414 - DNA, 135 bp, Zea mays
  misc_feature: Incyte ID No: 700158653H1
  unsure 70-71, 128: a, t, c, g, or other
gttgcacttggactacttgatgagggcaaagttgttctgggtgtgttgggatgtccaaatcttccattannatcaacaaacaagaacaatagcagctcttttggggatcgaataggttccctcttttntgctaca

SEQ ID NO: 1415 - DNA, 262 bp, Zea mays
  misc_feature: Incyte ID No: 700158654H1
  unsure 129, 144, 147-148, 152, 157, 159, 162, 170, 181, 186, 206: a, t, c, g, or other
cacctaacgacccacacgagcaccaagccgaggggaggggcgatggcgagaggtgtggtgtcgacgaagggcggcacggccgcgggcaagaagaaggggtcggtagccttcacgatcgactgcaccaancccgtggagaccaanttnntggntttcncntcntcgagaanttcctgcaggngcgcntcaaggtcgccggcggcaangccggcaacctcggcgactccgtcaccatctcccgcgagaagaccaaggtcaccgt

SEQ ID NO: 1416 - DNA, 258 bp, Zea mays
  misc_feature: Incyte ID No: 700158657H1
  unsure 239-240, 246, 255: a, t, c, g, or other
cttctttctttttgttgttgttgagaaatttggtgttttctcttctacaactattgagcatctcgtagtgtatttactagaaaaccataaaatgaaatatcttcattgtttactagaaaaccataaatttaacactatatgtggtctcactttttttgtttttttgtaccacatttatgcgtatacctcaagcatatctgttcattttggcatgtgctgcatacatctctgtatattgnntggctntctcctctncta

SEQ ID NO: 1417 - DNA, 257 bp, Zea mays
  misc_feature: Incyte ID No: 700158662H1
gcggcacggacctggaccacggcgtggcggcggtcggctacggcgtcagcgaacgacggcacgccctactggatcgtcaagaactcgtggggcccttcctggggagagggcggctacatccggatgcagcgcggcaccggcaacggcggcctctgcggcatcgccatggaggcgtcctttcccatcaagacctcgcccaacccgtcgcgcaaccccgccgcgcgctcatcaccagggacgcctcttcccagtgacag

SEQ ID NO: 1418 - DNA, 260 bp, Zea mays
  misc_feature: Incyte ID No: 700158665H1
  unsure 202, 210, 214: a, t, c, g, or other
ggcgttcattcactctgtaaggcgttcttcacccaacgcttctcgcacgggggtgttctattggtagtcattatttgttcaggtgaactaggtctgaaaatctgggcaattccagattctcatgtgagatgataaaaatgtcataatcatttgctaagtttaatgacctacgtcagttcttacgtactaaaaaatattcgcnagttgagncgtnccggcatattcctgatgtcctacggtgaacttgtatgtcattatca

SEQ ID NO: 1419 - DNA, 261 bp, Zea mays
  misc_feature: Incyte ID No: 700158668H1
  unsure 104, 159-181: a, t, c, g, or other
cacacacacactcaacagcaacagctaagcctctcccacaagacagcaacatggctgaggaggaggccaagaaggtggaggtggaggtcaccaaggagcccgangcggcggcgaaggaggacgtagccgatgacaaggccgtcatccccgcgaccgacnnnnnnnnnnnnnnnnnnnnnnncgacgactccaaggccctggccatcgtcgagaaagttgcagatgaacctgctcccgagaagcctgcccctgcgaacaagg

SEQ ID NO: 1420 - DNA, 254 bp, Zea mays
  misc_feature: Incyte ID No: 700158669H1
  unsure 71, 105, 107-108, 126, 147-148, 171, 177, 183, 185, 187-188, 192, 194,199, 202, 217-218, 230, 232-233, 236-237, 241, 246-247: a, t, c, g, or other
catgcactccctgcggtgcgcccttcgctaccccatccccagtaccgccgcctctttatccacctccggcntccgccgtctctcctcccaccatcgcactccacngnngctccgctcagcgaccancggtgaagacgagtggaaganngcgtgggagaccgatggcttccnggcgantccccngntnntccngngggcnggnggggcaatgggagtnncggtttggttgngnngtnngaantcggnnatttggg

SEQ ID NO: 1421 - DNA, 259 bp, Zea mays
  misc_feature: Incyte ID No: 700158670H1
cttggaaccagttcgggttgtcggtgacgcgcgagccgcagccgctgtgcgctacttgcgcgattcagaagcctgcgtaacctgtgcccttgaccttggcttggcaccttgctgctctctgcatccatgcgcctgtaattttgatcaggcaggttgttggtgcgctcatgagctgcttgtgtcgagctcgtcgttgtgtaattgcaatttgtagctacattggtgcatacttgtgggtgtccagttgcaagtgtaagta

SEQ ID NO: 1422 - DNA, 254 bp, Zea mays
  misc_feature: Incyte ID No: 700158672H1
  unsure 5, 14, 57, 149, 230: a, t, c, g, or other
ggacntgggcttgncgccgcctactcgctggtatccgcgttctacactgccgtgagnaggcctgccaccgtgtcgcgctcctggctcgtcttcctcctcgaccaggtgttcacgtacctgatcctggcggcgggcgcacggcggcggantgctgtacctcgcctacaacggtgacaaggaggtgacgtggagtgaagcttgcggcgttttcggcagcttctgccgtcagngcgcacctccgtcgccatcacctt

SEQ ID NO: 1423 - DNA, 256 bp, Zea mays
  misc_feature: Incyte ID No: 700158673H1
ggattctcagaacacctttgcaatgctgagtacatttaatgaagttgacatgaccaatttgatgaagcttcgttctgattataaagatgaatttgtcacaaagcatggtgtaaaattgggtcttatgtcttgctttgtcaaggctgctgtttctgcacttcaaaaccagccaattgtcaatgctgtcattgatggtgatgacatcatatacagagactacgtagacatcagtgttgctgttggcacttccaagggc

SEQ ID NO: 1424 - DNA, 253 bp, Zea mays
  misc_feature: Incyte ID No: 700158675H1
  unsure 66, 76, 104, 197-198, 201: a, t, c, g, or other
ctcagaggtgggttggcttctcctcccccaccggttcgtgttcaggttctggttcgtgggcgaganggaagagatngcggcgtcggacgttgagtaccgttgcntcgttggcggcctcgcctgggccaccgacgaccactccctcaacaacgccttcagcacctacggcgaggtcctcgagtcgaagatcatcctgnntcnggagacgcagaggtcccgcggcttcggcttcgtcaccttctccacggaggac

SEQ ID NO: 1425 - DNA, 254 bp, Zea mays
  misc_feature: Incyte ID No: 700158676H1
ttggtgtcatgctttgggcagcatcttggccaagaacgcgctatgccatgttgcaaatggaggccttttccctgtgaaaatttatgtgggaatcctctcctttgtggcaaccattattgtacaaaatcttgccatgtgttagaagtcccattgaatcatcctgaaggagatcgtacaacatctatcagtaaattgaacgcacttgctatgccttgtgaacaatgcaatcttccttgtaaaagggttagatactc

SEQ ID NO: 1426 - DNA, 254 bp, Zea mays
  misc_feature: Incyte ID No: 700158677H1
ctaagaaggagactgagaggcttcaccgcatgctggagaagtcaatcagtccttccaaagctgatgaattcatcgttaagaagaacattctttcgatattctcttcgtgaaggtgatgatccacagccacggcctgccagtgacttgaactgatagcgaaccaccactttacggaaaacagaacaaatcggatgatgtgagagaaaggtggtagtgaagtccagtagtggcagagctacttcgtgcacgtagat

SEQ ID NO: 1427 - DNA, 253 bp, Zea mays
  misc_feature: Incyte ID No: 700158678H1
ggtttgtgcaagagcagtttacaacttcaggatatgcatcatatcgctggcaggtgagcatatcggattttggtcaccatgacctatacgacatattcggggacatctcatcgaaagggctcccacaagagtcgctgaagaaactgccacactatgtggtcactgaccagacgcgcgcggactcgttcggccagatcctgtcctgccctatctgtctacaggacatcgtagccggcgacacagcaaggaggct

SEQ ID NO: 1428 - DNA, 209 bp, Zea mays
  misc_feature: Incyte ID No: 700158681H1
tcggtacaaggatcaccgctgtgcctgcgcgtgctgcttcaccgaatcgagtcagatcctgtccgaatccgagctaagggatggcaaccggtagtgaagcctcgaaggcagctgaggctgtggttgactggcataaacacgacagcaagaggatgctccatgcggtttacgtgttggggatttggaccgcacaatcaagactaaccgga

SEQ ID NO: 1429 - DNA, 252 bp, Zea mays
  misc_feature: Incyte ID No: 700158685H1
  unsure 129, 190, 215, 220-221, 230, 234: a, t, c, g, or other
atacctttatacaccttcccaaatcctcctgcacccagcacattcttattcttaaatccttcgtctctgaattccagacacggctactgtttaaccaggcatttagccggggcctccagatctcaaggntccttgctggtcagaaggatgttagcgagttcgagttcaagtgaccaattttatccctctngcaagcaaaccaaactcactttcangtaanngtttacgangacnatttgggggccgaacccc

SEQ ID NO: 1430 - DNA, 230 bp, Zea mays
  misc_feature: Incyte ID No: 700158686H1
  unsure 46, 132: a, t, c, g, or other
gcaagccagaggaggagggcgcctccggcgaggtcgactacgagangaaggagaagcaccacaagcacatggagaagctcggcgagctcggcgccatcgccgccggcgcgtacgccctgcacgagaagcacnaggccaagaaggacccagagaacgagcacgggcaccgggtcaaggaggaggtggccgccgtcgccgccgtgggctccgccggcttcgctttccacgag

SEQ ID NO: 1431 - DNA, 182 bp, Zea mays
  misc_feature: Incyte ID No: 700158688H1
  unsure 175, 177: a, t, c, g, or other
ataggcacacctggagtttctggttagtggcaggccgtcacgttcgacatttcagcctccatgttcctgatatttacagacagttataatgcaaaaggcgacattattttcattcagctgttaagttgggaaaaaacaacctgcttcgtatattagtcccatgttttcataaaananaaaaa

SEQ ID NO: 1432 - DNA, 250 bp, Zea mays
  misc_feature: Incyte ID No: 700158689H1
  unsure 215: a, t, c, g, or other
agcaaacttaacacattttgtccaactggaagatcgtttgctgcagcgaccactgatggtgttttattgtactcagttgatgaatcatttatttttgatccaacggacctcgacatcgacgttacgcctgagaaagtagaggaagctcttgcagaaaaccaacaacaaagagcccttatacttagccttcggttaaatgaggatttattgattangaagtgcatattcgcagttgatccagccgatgtga

SEQ ID NO: 1433 - DNA, 247 bp, Zea mays
  misc_feature: Incyte ID No: 700158691H1
gtgatgtctgtgccacagctgcagcagaatggcggttcagctaaacccatggtaatgtttggctctgatggaactgggagcttgacatctccagcaaacccattggatgatgttgaccgcttgctagaagatggctcattggatgataatgttgaatcttttctatcacaggatgacatggatcctagggacaacttggggcgatgcatggatgctagtaaagggtttggtttttctgagattgcca

SEQ ID NO: 1434 - DNA, 247 bp, Zea mays
  misc_feature: Incyte ID No: 700158693H1
gtcgttcaacgccaagctcggggacttcggcctagcgcgcctcatcgacgacggccgccgctcgcacaccacgggcgtcgccggcacgttcgggtacatggacccggagtccatgctcgccgggaaggccagcgtcgagtcggacgtgtacagcttcggcgtcttcctcctagagatcacgtgtgggcgtcggccggcggtgctcgtgagagaggaggactacgtccacctggtgcagtgggtctgg

SEQ ID NO: 1435 - DNA, 235 bp, Zea mays
  misc_feature: Incyte ID No: 700158694H1
gagcaatccgtgagaatagcaaacccctatctcttataaagaagaagatagataggtccacgagttgagacagagaagttctgactaatcaagtaggagtttacccacgagagtcagaggctgcatcatcaaaggggtatagaaataattcagaagcactatggcctgaagcgaagggcaggaacgaacggaatcaatgtgttccaatttatccggagtaaggacagcagccgag

SEQ ID NO: 1436 - DNA, 249 bp, Zea mays
  misc_feature: Incyte ID No: 700158695H1
  unsure 15, 34, 36: a, t, c, g, or other
ctacatccggatgcngcgcggcgccggcaacggngncctctgcggcatcgccatggaggcgtccttccccatcaagacctcgcccaaccctgcagacccgccgcgcaagccccgccgcgcgctcatcgccagggacacctcttcttcccagtgacacacacgaccacaactggcacgtaagtacacgttgccaggaatgacatgctatgctactagtgtttgcttgaactattatcgattgggtttgta

SEQ ID NO: 1437 - DNA, 249 bp, Zea mays
  misc_feature: Incyte ID No: 700158696H1
  unsure 238: a, t, c, g, or other
ggctggaactgttagatgacaatgagcacatactcagcgtcagatttgttggaggtgatcacaggctgcagaactactcgtccatcctcaccgtccaccccgaggtcatcgacggccgaccggggacgctcgtgatcgagtccttcgtggtggacgtccccgacggcaacaccaaggacgagacctgctacttcgtggaggccctgctcaagtgcaacctcaagtcgctcgcggaagnttccgagcgac

SEQ ID NO: 1438 - DNA, 172 bp, Zea mays
  misc_feature: Incyte ID No: 700158803H1
ggaacagttggtgacgacattaatttgcctcagccccttagcaggaagcgctggtcacctcagttttgtgtagacaaaatctaggcatcgataaatgatgggggactatgcatggtgttttggcagcactgttcagtaccttgccttctaaatctggtttttggtgtgtgtg

SEQ ID NO: 1439 - DNA, 169 bp, Zea mays
  misc_feature: Incyte ID No: 700158806H1
cttaattattgccaggacaggagaaacaaacaaagatgaggcctcagctgatactcgtcggcactctggctgttctcgccatcctcgcagctctcggcgaaggctcgtcgtcctggccgtgctgcaacaactgcggtgcttgcaacaggaagcagccgccggagtgcca

SEQ ID NO: 1440 - DNA, 180 bp, Zea mays
  misc_feature: Incyte ID No: 700158807H1
gcagctttgcaattgagtgtttgctgctttacttatttttctatatgctgttccttttgatgttatatgctgtaaggaaaatctgtacatgatggtaccttagggtatggcatgctggagttcccctttaacccgaagagccggatacttttgccagcctcgtcagcatgtgtaaacagt

SEQ ID NO: 1441 - DNA, 103 bp, Zea mays
  misc_feature: Incyte ID No: 700158810H1
  unsure 4, 6: a, t, c, g, or other
cganancttgtacaacaaggctccagactgttgaaggatttgtattaataacatgcacaattgtatgtcttgtgcttgagctctcgctgttaccagaaaaaaa

SEQ ID NO: 1442 - DNA, 269 bp, Zea mays
  misc_feature: Incyte ID No: 700158811H1
accagatggtgttttgtcatatgatgtaagcaccgggatttggaggcaatttgccatcccactgccactgcatctgactgatcacacacttgccgagttccagggaagggttatgctggtgggtctgctgtgcaaaaatgcagcgacctgcatctgcatatgggagttgcagaagatgactctcctctggaaggaggtggacagaatgccaaatctctggtgcttagagttctacggtaagcacatgaagatgaaatgcctgggcaaca

SEQ ID NO: 1443 - DNA, 270 bp, Zea mays
  misc_feature: Incyte ID No: 700158812H1
  unsure 233, 255: a, t, c, g, or other
gtcttgtgttgttcggagcgggcagcagcacacagccccatcccaatcctagtcgatcttcttcccctcctcaaggaagaaaagaagctgaaccatggggaagagaaagtcagctgctaagccacctcctaagaagcggatggacaagcttgacactgtcttttcctgcccattctgcaaccacgggagtagtgttgagtgccgaattgacatgaagaatctgattggcgaanatcttgtagaatctgtcagganaacttcagcacaact

SEQ ID NO: 1444 - DNA, 271 bp, Zea mays
  misc_feature: Incyte ID No: 700158813H1
cagctcttgggatcaagaagggaacagtggacgagtgggtgaggtgtcacgacgcagacctgccgtacacgatcgacctcaagagcgccatcaagtaccaccggaacctgacgtccagaggctaccgcgccctggtgtacagcggcgaccatgacctgctggtgccacacctgggcacccaggcatgggtcaggtccctcaacttccccgtcgtcgacgactggagggcgtggcatctcggtggccaagccgccgggttcacgataaatta

SEQ ID NO: 1445 - DNA, 273 bp, Zea mays
  misc_feature: Incyte ID No: 700158815H1
  unsure 218: a, t, c, g, or other
agctcgccgacgcgctgcagctcggggacaggttctacgtggtagggtgctccgtgggcggctacccagcatggagctgcctcaaatacattcccaacaggctggccggagtggcactggccgcgccggcggtgaactactggtggccgctgcctgccaacgtgtccagggccgcgtacgggaggctccacgcccgggaccgtagaccttctggatcncgcaccacgcgccggcgctgctccacgcctggctcgcgcagaagtggttccgggt

SEQ ID NO: 1446 - DNA, 166 bp, Zea mays
  misc_feature: Incyte ID No: 700158818H1
ctggaattgtggttttgcaagagtggtggggagttgactatgagataaagaaccatgcgatctacatttcccaacttggtggaggatacaaagcactcattccagatttataccgtggaaaagttgctctggatgttgctgaggcacaacatctgatggagggtcc

SEQ ID NO: 1447 - DNA, 118 bp, Zea mays
  misc_feature: Incyte ID No: 700158820H1
  unsure 19, 23, 36, 53, 101, 111: a, t, c, g, or other
ccactcgcgaccttgtgtnctcngacgatgttgggntcctcaagacaggctgnggcaactcgtacgccccatttcctaaaggttgcttctacaccacctcnggtgggctgnagagctt

SEQ ID NO: 1448 - DNA, 166 bp, Zea mays
  misc_feature: Incyte ID No: 700158822H1
gcttaactggttgttgctataccttatgcagcattttgctgaagttatcaccatgaggtgaggtagtttgagtgatttatgtggtattagagaattcaactgtgtcaagttcgtgcaacgtcagtttgttcagagttttatttttttattggcgtgttatcttggt

SEQ ID NO: 1449 - DNA, 257 bp, Zea mays
  misc_feature: Incyte ID No: 700158823H1
  unsure 225, 240-241, 244, 251, 254, 256: a, t, c, g, or other
cttggcattcttgcctgttcttaattattgccaggacaggagaaacaaagatgaggcctcagctgatactcgtcggcactctggctgttctcgccatcctcgcagctctcggcgaaggctcgtcgtcctggccctgctgcaacaactgcggtgcttgcaacaagaagcagccgcggagtgccagtgcaatgacgtgtcggtaacgggtgccatccggagtccatnaatggtaaagggggnnaanaattccnccngnt

SEQ ID NO: 1450 - DNA, 175 bp, Zea mays
  misc_feature: Incyte ID No: 700158824H1
ggcagaggcgcactgctgggcggtggggtggacttggcggcaatgttcgaacgatcgaccttggcgacgccgaggatgttagagaagtctcgggaacatacggcgcatttgaaggtgccattacgctgacctcgctcaggctcgtcaccagcagcagaacctggggcccctgggg

SEQ ID NO: 1451 - DNA, 263 bp, Zea mays
  misc_feature: Incyte ID No: 700158826H1
ctctagtaaagtgaaaaatacacttatattcaacacatttgtattgtgccaggtgtttaatgaggtcaattctcgtaaaccagaagaactgaacatcttttccggagtttcaagaaatcatcttttcttggcagtagtgagcataactgttgtgatgcaggtgataattattgagttcctcgggaaatttacatcaacagtgagactcaactggaagctttggcttgtttctgtagttattgcttttctaagttggcccttgg

SEQ ID NO: 1452 - DNA, 266 bp, Zea mays
  misc_feature: Incyte ID No: 700158830H1
aatccattggggcccctgggatggcagttctccagtttgctttcggaggtggttctgacaaccctcatttgccacacaaccatgaaatggatcaagttgtgtacactggaacacatgataacgatacagttcttggctggtggcaaaatttaccagaggaagaaaagaaaattgtgatcaagtatctaccagaagccgagaatattgacataacatggacactgattacggctgccctctcttccgtcgcgaggacttccgtggta

SEQ ID NO: 1453 - DNA, 266 bp, Zea mays
  misc_feature: Incyte ID No: 700158832H1
ctctctccctctctacctgccccgttcctcaccagtctcttccgccggcgtcgacgagagctgcgctaggtgatctcgactgcttcctcgccccccatggcgacggcgctcaaatcgttcctgaacagccccgtcggccccaagaccacccacttctggggccctgtcgccaatggggcttcgtcatcgcgggtttggttgacatgaacaagcctcctgaaatgatattggcaatatgacagcagcatgtgtgtgtatttggatct

SEQ ID NO: 1454 - DNA, 205 bp, Zea mays
  misc_feature: Incyte ID No: 700158836H1
cgaagagcagctcaaaggcaagcaagaagagacgctgatctacttataggtcgcagttgacggtgtagctggtggttttgcctggaggaactcttggtagtttgagctgtgcgaaagcttttaagtttacatttactcaccactccatgaacggcaacgaatattcatcagttagaaaagtgcacctataattttggttgcttat

SEQ ID NO: 1455 - DNA, 118 bp, Zea mays
  misc_feature: Incyte ID No: 700158837H1
tgaacccatctcgaatgacaactttgggctcaactgccggaacattgttgcgtgggcccgatcgcacatcgagagcgggaacatccacgccatcattgatgagtcgttggacagaggc

SEQ ID NO: 1456 - DNA, 118 bp, Zea mays
  misc_feature: Incyte ID No: 700158838H1
cagctagctagctagcatggccgggaaagagcttacgctgctggggttatgggcgagcccgttcgtgctccgggcgcgcatcgccttcagcctcaaaggcctcacctacgcatactcc

SEQ ID NO: 1457 - DNA, 118 bp, Zea mays
  misc_feature: Incyte ID No: 700158839H1
agtgtacgaacatgtcatcagagcactaagctcgttccaaggctgattcgtaaaaacaaaaagaagaaggaaaagtgttgttgcgtggagtgtaacatagctggatccccaactctca

SEQ ID NO: 1458 - DNA, 201 bp, Zea mays
  misc_feature: Incyte ID No: 700158840H1
  unsure 168: a, t, c, g, or other
gcgcttccagttccggctgtccccttcctacacgcatgcgccgtacaccgtccttctgctgcatcctcagcatggcgcgccaattattttcgacaggatctgactgcccttgcatgacatcgtcgatcgttgtcagcatgtgtcacagtgcaaataaactcgtatgantaatattgtgttagggagattctagttctgtgt

SEQ ID NO: 1459 - DNA, 252 bp, Zea mays
  misc_feature: Incyte ID No: 700158842H1
cgacgtagaacatgtactcgacttccaggcgtccctcgcagagccccgcgcgcagaacgcgctggccgaggtccaggagtatacgtccttcctccgggtgctcgggagctaccccatggacatgacccccatgaccgccggctcctcctccaccgttgtttcctcgtccgatgatccctcgtcgtcttgattgccgttggaggctggagtagctccgaggagaagtcgtcgagtagggacgttggttttctg

SEQ ID NO: 1460 - DNA, 254 bp, Zea mays
  misc_feature: Incyte ID No: 700158844H1
gccgccaccaggtgcagagtctttcgtcatctcttctccggcgaagaacccccagtcgcccaccagatcacttgttaaactttgttgaggggtgatggcggtttctttcgcaaacctcaactccgaggcagggcttaaaaagcttgatgagtaccttctcactcgcagctacatcactggctaccaagcttccaaggatgacttggctgtctacacttcgttttcggctgctccctcgtccaagtatatcaacg

SEQ ID NO: 1461 - DNA, 254 bp, Zea mays
  misc_feature: Incyte ID No: 700158845H1
cacaatgtgaacatcaacgtggctgtgcagactgaacacggattgtttgttccagtaattagggatgcagacaagaagggacttggtacaattgctgaggaggtgaagcagttggctcaaaaagcaagagacaatagcttaaaaccagcagattatgagggtggcaccttcacggtatcaaacttgggaggtcccttcggaatcaaacaattctgtgccatcataaatcctcctcagtcagcaattttggctat

SEQ ID NO: 1462 - DNA, 264 bp, Zea mays
  misc_feature: Incyte ID No: 700158849H1
  unsure 250, 254, 261, 263: a, t, c, g, or other
gttctagctactgttgtgaagtcaaatctggctcctgtgcggtattgtgatgattctaacaatattactgagacctatcccttcaaccctaatggttctccactgggtatagcagccctttgctcacctgacgggaggcacctggctatgatgccgcatccagagcgttgcttcatgatgtggcaatatccatggtatcccaaggaatggcaggttgagaagagtggccccagcccttggctgcgaaatnttcnaaaatgntng

SEQ ID NO: 1463 - DNA, 216 bp, Zea mays
  misc_feature: Incyte ID No: 700158850H1
  unsure 195, 204, 206: a, t, c, g, or other
tgacccctagtgtccggatttaacttcaaacatggcggacgtcgatgtcgagccggaggtcgccgccggtgctcccaagaagaggacgttccgcaagtacagctaccgcggcgtcgacctcgatgcgctgcttgacatgtccaccgacgacctcgttcagctcttcccagcgcgcgccaggagaaggttccagangggtttgangngaaacccttg

SEQ ID NO: 1464 - DNA, 256 bp, Zea mays
  misc_feature: Incyte ID No: 700158854H1
agcatgaggaggatcatgtgaatgacccacaggaggcatggcaagaggttgatccagacgagtactcctatgaggagctagttgcattgggtgaagtagttggcacagaaaacagaggtctctctgctgatgcacttgcttctttaccttcagtaacatacaagatgcaaagtgttcaggatggcaacacagagcaatgtgtaatttgccgtgtggaattggaggagggtgaatctttgattgcacttccctgcaa

SEQ ID NO: 1465 - DNA, 256 bp, Zea mays
  misc_feature: Incyte ID No: 700158855H1
  unsure 32, 40, 43, 126, 209, 239, 246: a, t, c, g, or other
ggtcgacgcgccatatagatactagtctcggnttaagcgntanttaacgcaaagaatctccaagtttgcttcgctcttgcattgaaccatggagtctggacggctcatcttcaacgcgccgggctntggcgccgggcagatgctcttcctcgactgcagcgcaggcagcggtcccggcggcggcttgttccatcgaggcgggagaccgntgcttggccttgaagaagggcgcggcgtanaacggcnctttttcacc

SEQ ID NO: 1466 - DNA, 163 bp, Zea mays
  misc_feature: Incyte ID No: 700158858H1
ctttgttctcttcttccttcacgtcttactcatttttttgtttacgcgaaattgtttctgtacaaatgtcttaactgaaaatacattaatttttgagtgggtttgatatgtagccatttgttaggtaatgagattggcttacggtgggcagatgtgcacccgt

SEQ ID NO: 1467 - DNA, 263 bp, Zea mays
  misc_feature: Incyte ID No: 700158859H1
  unsure 2, 5, 7, 238: a, t, c, g, or other
cngancntggtctgcactggctgtccatgatggcatcctggaggatgttgtcttcccaagctgagattgtggggaagcgtgtcaggtaccgtctggatggtgccaagatcatcaagatcttcttggacccaaaggagaggaacaacacagaatacaagctggacacctacactacggtctaccgcagctgtgtgggaaagatgtggtctttgagtaccctatggccgaaaatgcatanatatgacgcccggatatccccattt

SEQ ID NO: 1468 - DNA, 262 bp, Zea mays
  misc_feature: Incyte ID No: 700158860H1
attattagtttgctttatttattatcagttattttttaagacatttttgttatgtaataaagttggtgacatttgtctctatacactgagtcattatatgtgttgatcttaaatctgggtttgccccttaaatctgggtgtgacagtgcgcgatggcggtggaccccgggatgcgtgcgacggcggcaccatgcgtggcggcgacgacaattccttgatccagaggcacgacggtggtagctctccgatccgaagcatggcg

SEQ ID NO: 1469 - DNA, 264 bp, Zea mays
  misc_feature: Incyte ID No: 700158861H1
gtgcggattgccacctacctggcacgctgtgcatgtggactgactgcactacctgcttcgaaggctgtgctaccacagccggcgagtgcggtggttgcttgggaggggctggggaagccgggctaccgcttctcctcatcatgggggtcattgtgctggggcttttcacggtcatcggcatattctacagtgtcctggtcgcgaccatggttggccagcggatctggcagcgccactaccacattcttgccaaacggttgctaa

SEQ ID NO: 1470 - DNA, 273 bp, Zea mays
  misc_feature: Incyte ID No: 700158864H1
  unsure 81, 138, 258: a, t, c, g, or other
ctcactactacatacatcaccaactaggatcgatctctcgacagcaaatagctagcaatggagaagtacaccaaagccctngcgtcattgctcagcatgctggtgctggcacctctcctcgccatggccaccgacccngaccccctgcaggacttctgcgtcgccgacctcaacggcaagctgtcagtgaacgggtacccatgccagccgccgtcgtcggccggcgaccagttcctcttctcgaccaagatcgccacnggaggcaaccccctg

SEQ ID NO: 1471 - DNA, 78 bp, Zea mays
  misc_feature: Incyte ID No: 700158865H1
  unsure 24, 59: a, t, c, g, or other
ctgtcgtcttcgtctccggcagancaaagcgtcggcgaggcgggagatatagaggaganacgagagcgggatggggta

SEQ ID NO: 1472 - DNA, 230 bp, Zea mays
  misc_feature: Incyte ID No: 700158867H1
  unsure 220, 224-225, 228: a, t, c, g, or other
gggcgtccccgtggaggagctgtccaagagggtggaagagctgacgaggcttcactagtgtagatggaacatggaagcgttgcttgtaagcaagtagtaacttgttccctgagctgtagcctccgcggctcgcacgatcaaagtgttcggccgtggctgcagtctatcctatgctatatcctatcgtgatttgtttgtttgagctgtgccagtttctttncttnntanta

SEQ ID NO: 1473 - DNA, 251 bp, Zea mays
  misc_feature: Incyte ID No: 700158870H1
gtcggatcctttgccattgcatacctgtgtgacacatttatctctgacaagaaggcatttggaggtagcacccccaagactgtttctgagaaggagtggtggcaagccacagacaccaagttccaggcctggcctcgcactgctgggccaccggttgtcatgaaccccatcagccgccagaacttcatcgtcaagtccactgagtaggtttgggctggagaagctggttctgcgacttggtgccgccatga

SEQ ID NO: 1474 - DNA, 257 bp, Zea mays
  misc_feature: Incyte ID No: 700158873H1
  unsure 203: a, t, c, g, or other
cacggttcaagtggacacgtgggtagctgccgctgggaaaaatggcatgcgtcgagactggcatgtcctcgactgcaagtctgggatgtacgatcttgagagctacaagtgtttgggtgatgatgaataagaacactagaaggctttcaaaaatgccggacgaataagggctgagataggcccgtatttcaacgcccgcgcancataacagatgagcagagcgagaaactggctaagccaggagcactgctggtggc

SEQ ID NO: 1475 - DNA, 260 bp, Zea mays
  misc_feature: Incyte ID No: 700158875H1
  unsure 247: a, t, c, g, or other
aagatgtccgcacgaactacaactacacagagcctacccttgcggcaaacgctggcctggtggcagcgctcatttctatatctgatatcaaaaccggacggttcggcatcgacaagaacaccatcttctctgcgatccctccgatgtttccgacaccaccgccaccgccatcagcatggaaaccatagagagacagacctctgaatatattttccccccaaagcatcaacacagggaagtggagcanacatatgatcagt

SEQ ID NO: 1476 - DNA, 264 bp, Zea mays
  misc_feature: Incyte ID No: 700158879H1
agggcactgcttgaacacatacagaaattactggagcagttgggaaggtatccaacgtagagggatgatgcaggacctaagctgggataacgctgctaaactctacgaggaagttcttcttgccgccaaatatcagtggtgactgttgttgaactgtccaaggaactgttgatatttgtcattcatagacctgaaggctttctgtcgcatagaagtcaccgactgtttcaattcttttggtgactgcttcacacagctgctgca

SEQ ID NO: 1477 - DNA, 86 bp, Zea mays
  misc_feature: Incyte ID No: 700158880H1
  unsure 17, 24, 37, 48, 56, 61, 68, 72: a, t, c, g, or other
gccatggcggaggaagngtctgcncctgcagcggganggaagcgccgncggggaanatgangatggtngtangagtcgactagatc

SEQ ID NO: 1478 - DNA, 246 bp, Zea mays
  misc_feature: Incyte ID No: 700158882H1
ggcctatcaggaaaggcgcaggtgatgccaatgaggaatctttctgatgggcaaaggagccgtgtcatctttgcatggttggcatataggcagccgcaactgctactgctcgatgagccgacaaatcatttggacattgagaccattgactccctggcggaggcactgaatgagtgggatggtggtttggtcttggtgagccatgatttcaggctgatcaaccaggttgctcaagagatttgggtg

SEQ ID NO: 1479 - DNA, 253 bp, Zea mays
  misc_feature: Incyte ID No: 700158888H1
ggtgagcgccgcaacggggtacatcgactacgagaagctcgaggagaaggcacttgacttccgccccaagctcatcatctgcggtggcagtgcgtacccgagggactgggattacgccaagctcagggccgtcgccgacaaggtcggggccctgctgctctgcgacatggcgcacatcagcgggctcgtcgccgcgcaggaagctgcaaatccttttgaatattgtgatgtggttaccacaaccacgcacaag

SEQ ID NO: 1480 - DNA, 224 bp, Zea mays
  misc_feature: Incyte ID No: 700158889H1
  unsure 96, 116, 148, 173, 189, 211: a, t, c, g, or other
ctgtggacggtctgcggctcaacgtccgcgtgggcgtgcagtacctcgcggcgtggctggccggctccggctccgtcccgctgtacaacctgatgnaggacgcggctacggcgganatcagccgcgtccagaactggcagtggctgcnccaggcagcggcgtggacgccggcnggtggaggtgcgcgcnacgccagagctactcgcacgcntcgtcgaggagga

SEQ ID NO: 1481 - DNA, 256 bp, Zea mays
  misc_feature: Incyte ID No: 700158892H1
gtttctgcatgatgatattgcctgtaaaaaggctgctcaattttatctatccttctctgtacagagttgatgaagtactcacaatggaaccaaacaaggttgatgatgtttcattgaagcgattgccattaacgtttcagtgtttagatactggaggtttgtacctccttgatgatggcttcactttcctagtgtggttaggtaggatgctcccgcctgaacttgtgaacaacattcttggagtgagcttggcaaa

SEQ ID NO: 1482 - DNA, 258 bp, Zea mays
  misc_feature: Incyte ID No: 700158893H1
  unsure 119, 129, 147, 194, 225: a, t, c, g, or other
ctcgattgtagcagcagccgccgggaacaagatggcggcggcgttgtcgcagctggacgacgagatcgtccgcggcatggccatcggcgctgtcttcaccgactatgccgggaagatanactgcctcgntttccaccgcaaggaagntctcctcgtcacttccagcgaggacgactccatccgcatgtacaacntcaccagcgcgacgttgttaaagactacatntcacaggaaacatggtgctgaccgtgtctgttt

SEQ ID NO: 1483 - DNA, 261 bp, Zea mays
  misc_feature: Incyte ID No: 700158895H1
  unsure 251: a, t, c, g, or other
attgctgctcagttggaacagtacccaaaagcaactgagatatttgaagcgatcgctcgtcagtcaatcaacaacaatcttcttaagtatagtgtcagaggaattcttcttaatgctggcatctgtcaactatgtagaggtgatcctattgccatcacaaattcattggagcgataccaggaaattgacccgactttctctgggacacgtgaatacaagcttttagctgatcttgctgcatctatggatgnaggggatgtt

SEQ ID NO: 1484 - DNA, 87 bp, Zea mays
  misc_feature: Incyte ID No: 700158901H1
  unsure 6, 13, 25, 75, 82: a, t, c, g, or other
ctcgcngcctggngcttcctctacntcttccgcgcgtccgaccagcctgtcgccctcttcggccgagccttctcngaacgcnagaag

SEQ ID NO: 1485 - DNA, 91 bp, Zea mays
  misc_feature: Incyte ID No: 700158902H1
  unsure 80: a, t, c, g, or other
acatcctgcatgggtgaagatggttgggccttcagcagccacaaaaaaagtatatgccctagctggcttgttggtgctcngtgattctcag

SEQ ID NO: 1486 - DNA, 121 bp, Zea mays
  misc_feature: Incyte ID No: 700158903H1
  unsure 23, 43, 66, 103, 105, 115: a, t, c, g, or other
ccctctcccaacccgactagtcngactcgcagctccgccccangtccaggtccaagcatggaagtngcggcggcgtcggcgaggcccgtcctgcgcgtggctncnatctgcggcnccctcc

SEQ ID NO: 1487 - DNA, 275 bp, Zea mays
  misc_feature: Incyte ID No: 700158904H1
cttcagttgcaccgacctccagacgaaaccacccaagacgcgtgcttccattcctagcccaacagaagcgaacacgccaccgaccaccggcctcgaagggatcatcttctctacaactcgtcctcgtggccttgttcctcctcttgtataggggactgcggcggagtggagatccgtgccgacatagtccgacttcttcgctcgctgcctacgattgatggcctcaccttcaccaaccgaagagttcagcagggaagcagctcgtcagtctctgt

SEQ ID NO: 1488 - DNA, 277 bp, Zea mays
  misc_feature: Incyte ID No: 700158908H1
  unsure 19, 116-133: a, t, c, g, or other
ggtgaggaagcacagcganccgcaaggaactgctggctcatcatcgccggcaaggtacgtatatttcgtcaccggccgacgatcgactccgaccgtgtttgacgcccccggcctcnnnnnnnnnnnnnnnnnnctgctcaggtgtacgacgtcacgccgttcatggaggagcaccccggcggcgacgaggtcctgctggcgtccgtcggtaagtaaagtagtctcagactccagaccggtggtggtgactggtgagttggtagcgcttactgatgac

SEQ ID NO: 1489 - DNA, 82 bp, Zea mays
  misc_feature: Incyte ID No: 700158909H1
  unsure 2, 20, 55, 58, 68: a, t, c, g, or other
cncagctaaagccttgtgcnaaattatcattaagctgtcatcaatcatcatggcngcnattactgcangtctgctggtactc

SEQ ID NO: 1490 - DNA, 271 bp, Zea mays
  misc_feature: Incyte ID No: 700158910H1
  unsure 229, 240-241, 244, 247-251, 261, 263-264, 266, 269: a, t, c, g, or other
agttgttcgagccccaatgttttagatgctctatgctgtcgaagctgtgctgtgccattattgtagctgatttcgtctccattcacttcttttttcttgttagtaggctggtagtggtcgaattaatttgctttgtgttgccgctagtccatgtggactggtattgttcccctggatttatttggcaagcgtgtccgtgctcgctctagcgttttattgagcttttaangtcaaaaaaanngangannnnnaggtgagcgntnntnggntg

SEQ ID NO: 1491 - DNA, 169 bp, Zea mays
  misc_feature: Incyte ID No: 700158912H1
gaaagctaaagactatgtgaacatgctgaaggactggtacggcaatggagcgtcgaagctgtgcgtgatctacaaccagacgggcggaaccctgcggtacgtcgacgacaaggactggctgggctacccggggccgacgccctacccgacggagatcggcaacgggcat

SEQ ID NO: 1492 - DNA, 274 bp, Zea mays
  misc_feature: Incyte ID No: 700158914H1
ggaagcttgataggaaatggaagcagagcattgtggtcagaccaccaccatctctaagggggaacaaagaggagtagaaagccgcaaaaagagggcaatgtgcaaaagtcgtttcatgcgagtgttgcaggaaggtcccttcatgatttcaacccttattgcgttgttatgtattccatgtttacattttgctaagcattgctatctgaatctgaatttcagttgttagtctcttctgtaaattttgacttatttaaatttacacttctatcaa

SEQ ID NO: 1493 - DNA, 121 bp, Zea mays
  misc_feature: Incyte ID No: 700158915H1
  unsure 97: a, t, c, g, or other
cgcggacatgacggtggacgagttcaaggagtggctgcggcggttcgacacggaccaggacgggcgcatcagccgcgacgagctgcggcgcgccctncgtgccatccgctcccggttcacg

SEQ ID NO: 1494 - DNA, 87 bp, Zea mays
  misc_feature: Incyte ID No: 700158917H1
gggccaaaccatggccactatatcagtttggttaagagccacaatcattggttattctttgatgacgagaacgttgagatgactgat

SEQ ID NO: 1495 - DNA, 128 bp, Zea mays
  misc_feature: Incyte ID No: 700158918H1
ctcccagatactgcaatgattcttggtgctggcttcgggaaaggtggaactagcttgccattttgggaaaatgtatatggctttgatatgtcatgtattggcaaagaagtaacttcaacttcagctcg

SEQ ID NO: 1496 - DNA, 166 bp, Zea mays
  misc_feature: Incyte ID No: 700158919H1
  unsure 22, 32, 40, 62, 67, 138, 142, 147, 154, 162: a, t, c, g, or other
ccgagattagaaggctattggncgcgtacaanggcgaganctgcagcatcacgctaaccggncacancctgggcgcggcgctctccacgctcaccgccatcgacatcgtcgccaacggcctcaacgtccggggccccnacancgacncggtccncgtcgccnccat

SEQ ID NO: 1497 - DNA, 270 bp, Zea mays
  misc_feature: Incyte ID No: 700158921H1
gctctgcactcagaaacgggtgtgacactaagtgagatagatataagtaaacatataatttatggtggcatctcatggtggagtttttgtattgcacattaaactaaagtttgaaattcaaacacaaatttaaaatttggaaactgaactaggaaaaaataggaaaaaaacaaaaggaatacaacagccacttgggtctgtttctctaccttagcgcacttcagttgcatggcccagtcccttttcacccatcatcgcgacaccagcaca

SEQ ID NO: 1498 - DNA, 178 bp, Zea mays
  misc_feature: Incyte ID No: 700158922H1
  unsure 158: a, t, c, g, or other
tgttgccagatcccctgatgtttagctttaagcttgttacgaatggaactgtggtcaatgtcgattctccaaaggattctggcaatgttctgaggtgcaaagatcctatatctgctcatgaaatgacccatatggaagttcagattcgcaacaacacnaaggaaattatccggatgag

SEQ ID NO: 1499 - DNA, 270 bp, Zea mays
  misc_feature: Incyte ID No: 700158924H1
  unsure 268: a, t, c, g, or other
gaggcacggggccgagatgctcgtcgtcggcagccatggttacggagccattaaaagggctgttcttggaagtgtgagcgactactgtgcccatcacgcgcactgcaccgtgatgatagtaaagaagcccaagcagcacaagcactgatcaatgccgactgatcactacgtgtactgcaaataatttgtactactgcaaagttatgtgtgcgtccgtccgtttgtgaataattgggtcatcaaccatcacatcttcggttgcttctanag

SEQ ID NO: 1500 - DNA, 229 bp, Zea mays
  misc_feature: Incyte ID No: 700158925H1
gtgctgactacccaagcaatcgttgtggagaagcccaagaaggctccagcagcagctgctgcagcggcaccatagggttctttcaccatgtaataatactttctagtgaaaaacaattttactaggcatggaacaggcacgttagagtgacgaggagaaaaaactatttttgtcatgcgtgggccggaataaattgagtcaggaattgcatggattttgggccaaaaaa

SEQ ID NO: 1501 - DNA, 215 bp, Zea mays
  misc_feature: Incyte ID No: 700158926H1
  unsure 198, 202: a, t, c, g, or other
gctgggatgtgatgaagaatcattggtccgtgtttctgatcaatcattgatgtgtaaaacactccataattctgatccctgacagttgcgtaatctttaagtctgacagttgtccgtttaatgtctgctattgtagtttcacatgatactgtctgtagaatttaagcatatgctatgaatgtgggtgaactgattctngttncgttggatgccag

SEQ ID NO: 1502 - DNA, 128 bp, Zea mays
  misc_feature: Incyte ID No: 700158927H1
ggattatctaccgattcttgccgcctgactctgaatggtcataccaacgagaagaattttgtagggctatctgttcatgatggatacataacttgtggctctgaaaccaatgaagtgttttcttacta

SEQ ID NO: 1503 - DNA, 216 bp, Zea mays
  misc_feature: Incyte ID No: 700158929H1
cctggaggctacgtttatcagaaggcctacctcgaattcttctgcgcaaaggagaagttggaccaactaattgagaagatcaaagcattcccttctctcacttacattgctgtgaacaaggatggagaaacattctccaatatttcaccgaacgccgtgaatgctgtcacgtggggtgttttccctggcaaggagattatccagcctacggtgtgg

SEQ ID NO: 1504 - DNA, 128 bp, Zea mays
  misc_feature: Incyte ID No: 700158931H1
  unsure 2: a, t, c, g, or other
tnctgtcgtgccagatcctgacggagaacgtggtggggtcactgggcgccttctcgcctcccgtcagggcgctggtgccgctgctctacaccgtgcgccgcgtcttcgtcatcctcgactgggcctac

SEQ ID NO: 1505 - DNA, 88 bp, Zea mays
  misc_feature: Incyte ID No: 700158933H1
cgacaacgctgagttcaagatcgtgctcaccatcatccgcgacgggctcaaggctgaccccaagaagtaccgcaagatgaaggagagg

SEQ ID NO: 1506 - DNA, 89 bp, Zea mays
  misc_feature: Incyte ID No: 700158934H1
  unsure 27, 30, 32, 67, 71: a, t, c, g, or other
gtacgtcccaaaccaaaccatgtccgngananctcttctcctgacgaccgcgacgctgctcctgctncgtngccgctgcgcgtgtcggt

SEQ ID NO: 1507 - DNA, 60 bp, Zea mays
  misc_feature: Incyte ID No: 700158935H1
  unsure 15, 18, 32, 57: a, t, c, g, or other
ccacttggccgacanggncgcggctcccgctnctgctggtgccgtccctggcctccncgt

SEQ ID NO: 1508 - DNA, 264 bp, Zea mays
  misc_feature: Incyte ID No: 700158936H1
  unsure 120, 214-215: a, t, c, g, or other
gtagtcaaagggaatccacatccaaggagctactacaagtgcacgtttgctggatgcaatgttaggaagcacattgagaggtgttcatcagaccctaaggctgtcataacaacctatganggaaaacataaccatgaaccaccggttggtcggggcggcaaccagaacgcaggaatgtcatcacaacagaaagggcagaacaacgtatccagcnntcaagcttcattctcgagaccagactacgctaaccagatgccaattgga

SEQ ID NO: 1509 - DNA, 263 bp, Zea mays
  misc_feature: Incyte ID No: 700158938H1
  unsure 47, 55, 66, 95, 107, 127, 180, 221, 242, 246, 260: a, t, c, g, or other
atgctttccagtttgaagtctaaagccaagcagatggcgacaagttncaacatgncaaacttcgcnaacagggaggatctgcttggtcaaagtanaatgccagatgncatgagcagagttgctgggntagataaccaaggaattgttggccttcagaggcaaattatgaaagagcaagangagggtctcgagaagctggaagagacagtgctgagcacgangcatattgcattagcagtcantgangaacttaccctgcncac

SEQ ID NO: 1510 - DNA, 58 bp, Zea mays
  misc_feature: Incyte ID No: 700158940H1
gtttcattgtggttgaagtcttcctgccaaatattataagatctaagaaagttctatc

SEQ ID NO: 1511 - DNA, 172 bp, Zea mays
  misc_feature: Incyte ID No: 700158943H1
catttccaagctcctcctcgcgattccaatccacgcacgcctcctccgcttccgcctcgctcaggcttatagtcagtgatggaacacaaggaggcgggctgccagcagccggagggcccaatcctatgcatcaataactgcggcttcttcggcagtgctgcgacgatgaaca

SEQ ID NO: 1512 - DNA, 122 bp, Zea mays
  misc_feature: Incyte ID No: 700158945H1
  unsure 30: a, t, c, g, or other
cgagtgcaccgccttcgccgagggctcaangcggcgtgccccgaggcgatgctcgcctacaacctctcgccgtccttcaactgggacgcgtccgggatgacggacgccgagatggccgcctt

SEQ ID NO: 1513 - DNA, 86 bp, Zea mays
  misc_feature: Incyte ID No: 700158949H1
atgggttatgagtgatgctgaacttgttaagtcttttggtatatttgtacggctctccaatgatattgtatcagccaagcgtgaag

SEQ ID NO: 1514 - DNA, 82 bp, Zea mays
  misc_feature: Incyte ID No: 700158952H1
  unsure 2, 12-13, 37, 51, 58, 65, 67, 81: a, t, c, g, or other
gnaggagacgcnnacgggcatcgtgttcatggccganctccccgggctgcnccgcgangaggtgnangtggaggtggaggnt

SEQ ID NO: 1515 - DNA, 166 bp, Zea mays
  misc_feature: Incyte ID No: 700158962H1
cggattatagtcactttgcttgggattcttagacagaaaaatggaaaatttggtgttgctggagtttgcaatggcggcggcggcgcttcagccctcgttttggagctcatgcaatcctcttcgcatatccattcatcgttgtgaagttggtgcgagcaaattagca

SEQ ID NO: 1516 - DNA, 168 bp, Zea mays
  misc_feature: Incyte ID No: 700158964H1
  unsure 165: a, t, c, g, or other
gtggaaacttccttgttaaccttcttgggaagtggaaggagtctgaatactctggccattctattcctgttggtggtcttgcttactatgtaactgccccatcaagtttggctgatgtccttgcaaatccattccatgcactgttttatgtggtcttcatgctgncag

SEQ ID NO: 1517 - DNA, 166 bp, Zea mays
  misc_feature: Incyte ID No: 700158965H1
ccatctgctcgttgccttgattttgtggaacgaagcgatggctcgcagcggcgccatggtttcctgcatgctgctcctggtggtggcgcaactgctcatggtgatggccacgcagacagcggcggcggcgggcgaccaacgcggagctggacgccggctgctgtgg

SEQ ID NO: 1518 - DNA, 233 bp, Zea mays
  misc_feature: Incyte ID No: 700158970H1
  unsure 229, 231: a, t, c, g, or other
gtaagatattgactggctataatcagtgcacgaccaaagcttcggaatggcacacttccaaatggagatgcttcgaattcgaagagcaagcttacttcaacacatgatgtattgagaggtttggtcaattggctctgttcacagctgaggaatcctacacacccgagctgctctattcctacttctatccattgcctctccacttcgctaagagaaccatatgttaggncnta

SEQ ID NO: 1519 - DNA, 229 bp, Zea mays
  misc_feature: Incyte ID No: 700158975H1
  unsure 2, 11: a, t, c, g, or other
cntcggtcaanaatatccttgtacctgcatctcgacctcaccggcgtccggcggtggtatcacgatggtggcgttgctgggccggcggatcggggtggctgcggcactgccgcgttcatcgccctcgtggcgttcggatccgcctcatcctcgcccaagtccttcgtgaatccaccgtctccgcccacgagtcgtcatctttccaagtcatactgcccgtactgcaaag

SEQ ID NO: 1520 - DNA, 108 bp, Zea mays
  misc_feature: Incyte ID No: 700158978H1
gcaccagctagctccctgaggggcgaccttgtactctttacattgatgtatgtgtagtgctggacattcttaagttaattcggcaataaagtgtgttgtgcttctgct

SEQ ID NO: 1521 - DNA, 235 bp, Zea mays
  misc_feature: Incyte ID No: 700158980H1
  unsure 189, 217-218, 221: a, t, c, g, or other
tgtttacaccaagaattcagtcgatgtaggccatgtttggcactgctgctgcttgttgaaaaaacagcttatctgataagctggtgaaaagtagcttctgcttgttggctgcttttagtgtattctgagaagtagctgaactgataagctgctgcagaagctagctgtttgacagaacttttgcttaantttgtgaagaagctgaaaataagctgcnncanggacgtagtctctg

SEQ ID NO: 1522 - DNA, 252 bp, Zea mays
  misc_feature: Incyte ID No: 700158984H1
  unsure 233: a, t, c, g, or other
cgatggctgaggtacacaacgagcggcccgtggggatggtgggcggcgtccgggacgcgccggtgggccgcgagaacgacctcgaggccatcgagctcgcgcgcttcgggtcgccgagcacaacagcaagaccaacgcgatgctggaattcgagaggctggtgaaggtgaggcaccaggtcgtggccgggaccctgcaccacttcaccgtcgaggtgaaggaggccggcggcngcgaaaagaagctgtacga

SEQ ID NO: 1523 - DNA, 253 bp, Zea mays
  misc_feature: Incyte ID No: 700158985H1
ccaattggtttagatgaaagccttaaggtggatttgattgtgattgggtcagtggcagttgatccaagttcaggagcacggttagggaagggagagggatttgcagagctggaatatggaatgcttcgctatatgggagctatagatgattcaaccatgatagtaactactgtgcatgacaagcagttagttgatgacattccagtggagaagctgctagttcatgatgtgccagttgacattatctgcaccc

SEQ ID NO: 1524 - DNA, 254 bp, Zea mays
  misc_feature: Incyte ID No: 700158986H1
gggccccagctcaggagagcaaccttcgtcgactacagtctctgcagcaagtgatgtgaagactggggctgggccaacagagtcagcgtctgcaaacgtgtctaccgacaagaacaggaactacgctgtcctggcaggcacaattgctgctctgagtggcctgggttggtatctattgtcaaagcctaagaagtcggaggaggttgtggactgaagagggggttacgaatgcgagctgtggatggttggcctta

SEQ ID NO: 1525 - DNA, 82 bp, Zea mays
  misc_feature: Incyte ID No: 700158987H1
gcagaataaacgagcgtgcaagcgctgctgggctggtgtcagtcacctgagcaaggaagagagatggccacgctgcctcgcg

SEQ ID NO: 1526 - DNA, 250 bp, Zea mays
  misc_feature: Incyte ID No: 700158988H1
  unsure 44, 46-47, 70, 156, 172-173, 184, 195, 197, 216, 222, 225, 236: a, t, c, g, or other
cgcgcgagatctccgatccccgcccaaatcccacgacgccggcngnngccatgggcggcaaggacctgancggaggaccagatcgcctcgatgcgggaggccttctcgctgttcgacacggacggggacggccgcatcgcgccctcggagctgggngtcctcatgcgctccnntggcgggaacncacgcaggcgnantccgggacatcgcggcgcnggagangtnacgcaccttcnattaccgcgcttct

SEQ ID NO: 1527 - DNA, 254 bp, Zea mays
  misc_feature: Incyte ID No: 700158993H1
  unsure 224: a, t, c, g, or other
gttgacagcttacttggtgcaagaggtggtgcatttgagcatgaagcaacaagaaggatgcgcaatgaattcatggcagcttgggatggtctcaggtccaaagagaaccaacggatccttattcttggtgcaacaaatcgtccatttgatctggatgatgctgtgatacggcgtttacctagacggatatatgttgaccttccggatgcgcagaaccgaatganaattctaaagattttacttgcgaaggaaaa

SEQ ID NO: 1528 - DNA, 210 bp, Zea mays
  misc_feature: Incyte ID No: 700158996H1
  unsure 2, 148, 192, 195-196, 202, 207: a, t, c, g, or other
anaggtagcatcagctagcgttggagttgatgcgtaccatgttgagaaagtgttgcattcttttattcaaaaggggcaaaatgaatagacgataggttaccactttccccgtgtgattagtaattgtggtccctgcttcatgtgaaanagataggttatcttatgaataccaaagagggttggacggctaanaannaaaaanaaagngga

SEQ ID NO: 1529 - DNA, 260 bp, Zea mays
  misc_feature: Incyte ID No: 700159001H1
gtattttgagcttgaggacaatggtggattaagccttgctttacaggaagatagtgcaaaaactggaaaagttacttctgcgggcatgttctttctaggctttcctgtgtatcgatttgaacaaaacaattcagctgctgctgcgaaggatcctgacagtgctttctttaaaagattggatggctttcaaccttgtgaagtaaatgaactgaaagcaggaagccattattttgctgtatatggtgacaattctttaaaag

SEQ ID NO: 1530 - DNA, 259 bp, Zea mays
  misc_feature: Incyte ID No: 700159002H1
cagttctcaggattgatctcttacttccgccgaagagctgaagatcccgaaaagttgaaatcatgtgtcgcagaggctattgcattaaaaacatgtgatacaaaaactgcttcaaaaaaagcaaaaagtcaaatttgtcctgaattaaaggaaattttgtgtgaattggataaaaagataaagcagttatatggtgccctacttgacaattctatgcttattgtatgcaccggccatggtgatactcctctagtacgag

SEQ ID NO: 1531 - DNA, 257 bp, Zea mays
  misc_feature: Incyte ID No: 700159003H1
caagccaccatatgacggcgctaaagcatcaagtagtcgatctagtcgtcgtttcggaagcagaaggattagtccccaagtatcgtctggtaactatgaagttggacaggtttcatacaaatacaacttgctcaaatccagaggccccaggagaatgaattgcactcttgaatgcccttcagcgcaagagacctgggaaaactcactcaagacaaagtttcaggaggcccttgggtcccacaactttacgaaacaaa

SEQ ID NO: 1532 - DNA, 257 bp, Zea mays
  misc_feature: Incyte ID No: 700159004H1
attgtcttcaagaatggcatggcgaagtccattcatcatgctcgtgtgctcatcaggcaacgccaacattagagttgggaggcaacttgtcaacattccctcattcatggtgagagttgactcagagaagcacatcgacttctctcttaccagcccacttggtggtggagaacctggaagggtgaagagaaagaaccaaaagaaggcttctggtggaggcggtgacgacgaagaggaagagtgatcatgtgatgcta

SEQ ID NO: 1533 - DNA, 254 bp, Zea mays
  misc_feature: Incyte ID No: 700159006H1
ctattctgactgaccgccccgttcgtctctcaatctctcctcatggctcgctccaagctctccgtagaattgttgctggcattgctcgtggtcctcgccgccggcccggcgatgcgactggtcgaggcggcttcggcgcacctgcacttttacatgcacgacgtgacgggcggcccgtccccaacggcggtgcaagtggttagcgggccgcggggcaacttcggcaacaccatggtgatcgacgacaagctaac

SEQ ID NO: 1534 - DNA, 254 bp, Zea mays
  misc_feature: Incyte ID No: 700159007H1
actattagcacttgaggaaaggatcggaaatgttagcactggcctcagcgaggaagctgtgataaagttgctcaaacaaaggaaattttcatcgtggagactaaaagcatctttggacccagaaccatgctgtatttgccaggaggagtacgttgatggagacgatctccggaggctggactgcgggcacgacttccatgctggctgcatcaagcaatggctggtggtgaagaacgtgtgccccatctgcaaga

SEQ ID NO: 1535 - DNA, 251 bp, Zea mays
  misc_feature: Incyte ID No: 700159008H1
  unsure 78, 82: a, t, c, g, or other
aatgattccatcgacgtcgcggagtcccctttcggaataacagatgggaagacatagggtaaatacagcaaagcgaangcgncatgtaggccacagtagtcagtctgttgttccgaaagatgtgtatatatgtattagcagcatgattgttctgattatctttttactgattttcgatggtaggtctattccatcaagtatttaactaatcatttgttgctgttggtataggtcttttgttcttttagccg

SEQ ID NO: 1536 - DNA, 249 bp, Zea mays
  misc_feature: Incyte ID No: 700159010H1
aagattttctcgggctgagtgaataaatgttttgcagttatcatgtttgctgttatgttagatttagccgacttgtcacctgcacactgtaagattatgttgccatgctatagtgttcttgtacctgcaatagaagagttgcaagaataaagagtcagcttagaaccaacgttatgatgaccaagggggaaaatatgcatcaaacaatgattcagttggcagttggttcagtgctgatcatggcggtta

SEQ ID NO: 1537 - DNA, 250 bp, Zea mays
  misc_feature: Incyte ID No: 700159011H1
gttgatagtgattctaaagtgtcgaccacagtcactgttgatgaagcactaactggtttgaagacttcattcgccttcaaggtccccgatcacaagtctgggaagcttgatctgcaatatgcgcacaatcgtttttcattgaactcgaccattggtttgacatcagcacctttggttgaactggctgcaactgtcggcacaagtgaacttagcattggtgctgaggttgggtttgacagtacttcagctg

SEQ ID NO: 1538 - DNA, 86 bp, Zea mays
  misc_feature: Incyte ID No: 700159012H1
ggatgttttggatcggaacttaattcacataaaaagtgtgaagcttaaatacgaactcctgtcgacttttgattttttttttgaag

SEQ ID NO: 1539 - DNA, 248 bp, Zea mays
  misc_feature: Incyte ID No: 700159013H1
  unsure 137, 242, 244, 246: a, t, c, g, or other
atccacttacagtttatggaaaaggtggtcagacccggggatatctggacatcagagacactgtacagtgcgtggagctagcaatagccaacccagccaaacctggcgagttcagagtcttcaaccagttcaccgancagttctctgtcaatgagctagccaaactggtgactgcggcaggagcgaaacttgggcttgaagtggagaccaaatcgatacccaacccacgagtcgaggctgangngnct

SEQ ID NO: 1540 - DNA, 100 bp, Zea mays
  misc_feature: Incyte ID No: 700159014H1
  unsure 12, 34, 42-43: a, t, c, g, or other
caaatactttgncaattgtgtatgcacaattatntccgccannggggcagatccatgaacacaaaaaaaaacacgtgtcacagttgttttggcttttgtt

SEQ ID NO: 1541 - DNA, 57 bp, Zea mays
  misc_feature: Incyte ID No: 700159017H1
ctaatttcatttgtatgctaatgttacgtgtgtcaatgatgatggagtggttaaatt

SEQ ID NO: 1542 - DNA, 247 bp, Zea mays
  misc_feature: Incyte ID No: 700159018H1
  unsure 51-74: a, t, c, g, or other
atttcacattcaagtgcacaaaacaaaaatccagcattcatgcacattaannnnnnnnnnnnnnnnnnnnnnnnagaatgcataatctatgaacggagtaattcactcactaaaaaaaacctccttgtcatttttaaggaaataatttcaaaggtaggataactccctattcatgaacattctagtctaaatatttttaagacttttactaaatctcaaaatagaattttgtggtgttacaatcatc

SEQ ID NO: 1543 - DNA, 245 bp, Zea mays
  misc_feature: Incyte ID No: 700159020H1
  unsure 236: a, t, c, g, or other
ccttccccgatccagtctcgcggtcgcggccacgctgagggacagcgagaagagacagacacagatcgcgcgcggagatgtcgtcggactcgtcgtcgtgggcgcgcgccctggtgcagatctcgccctacaccttctccgcaatcggtatcgccgtctccatcggcgtctccgtcctcggcgcggcatggggtatcttcatcacggggagcagcctcatcggggccgccatcaangcgcccaag

SEQ ID NO: 1544 - DNA, 244 bp, Zea mays
  misc_feature: Incyte ID No: 700159021H1
caataatgtgatgcttgctgcggctctccgaacctcatcaaaacttgttgtaagcgatgacggtaagagagtcaaaaggcagcagccatttacagaatctgatttgcaggagctccagtcccggattgttgtagcagaaaatcttcctggtgatccctcctaccagaatcttaagaagatattttcagctgttggaagtttgatttcaatccgaacttgctatcctcagactccaaatggcact

SEQ ID NO: 1545 - DNA, 238 bp, Zea mays
  misc_feature: Incyte ID No: 700159024H1
gtcgtttacaagtttgtacatgaccttcacttttttgtcaccgctggagatgatgagaatgagctcatcttagcaagtgtactacatggtttttctgattctgttggtcttctactcaggggtgatgttgagaagcggactgcgcttgagaacttggatttgatacttctctgcattgatgaaattgtagatgggggaatcatcctggaaacagatgcaaacaccattgctggtaagg

SEQ ID NO: 1546 - DNA, 240 bp, Zea mays
  misc_feature: Incyte ID No: 700159025H1
tcttcttctactgtttgagcaatttatagcattcatatttaagacgaaaaggaggtgctgtgatacgaatttctttgaaagaaatcgtcgaacatttggattgaccttaactagcttaatttttttctcaaacgcgcaagagagatacacatcattatattaagaaaaaaaaagagtaaagtccaaaatagtcaaaacaggagagctgtgcatcattatattaactagcataatttaagg

SEQ ID NO: 1547 - DNA, 239 bp, Zea mays
  misc_feature: Incyte ID No: 700159026H1
gaacaatgagcttcaagaccgtactgcaaaattcaggaaacatgccaccgcaatagctgaatgggataagagaattctgcaaaacagaaatgttcttattaggcttgaggctgaggtggctaaagttgttgaaacacaaacaggcttggagcgtcaacttgaattgatagaaactcatcaacgagaggtagacaaggctctacagagtatggaggaggaagctgaacgcgtattccagg

SEQ ID NO: 1548 - DNA, 166 bp, Zea mays
  misc_feature: Incyte ID No: 700159028H1
atcgtctcaagttttgttctcctctcctagctagccagcacctgcagatctgctcgttgccttgggctactgattttgtggaacgaagcgatggctcgcagcggcgccgtggtttcctgcatgctgctcctggtggtggcggcgcaactgctcatggtgatggcca

SEQ ID NO: 1549 - DNA, 238 bp, Zea mays
  misc_feature: Incyte ID No: 700159029H1
  unsure 233: a, t, c, g, or other
attctgtgcagactatgcaaattttgaactccgatgatcatgcgaattatttgaggaagcagaatcacaatcctgcagattataggcctgatatcattcatcaggctctactagcaatatttgatagccctcttactaaggctggaaggttacaggctgtttatgtgagaactgaaaagggcgtattgtttgaaatcaaacctcatgtccgcatgccaagaacctttaaacgnttctg

SEQ ID NO: 1550 - DNA, 241 bp, Zea mays
  misc_feature: Incyte ID No: 700159033H1
  unsure 36, 57: a, t, c, g, or other
gccagttgactcaagcgccatacctctgctccatantgggcacccgtgtgtcacggncacgacgagattcggcggggatggcgcggtggcgggcgcggcgcctgctgcctctggccaccttcgtcacactcggcatgatccttggatctttgcttcagttagcacttcttcatcgactagatggctattcagtgcatgcagatagtgatccagaggctgttcttcttcgccttggatatgt

SEQ ID NO: 1551 - DNA, 143 bp, Zea mays
  misc_feature: Incyte ID No: 700159035H1
atccgatggcatattgcttggctcttatgaagagcgaaggtgttaacttaatagggggtaagcgcttctgcattcaaactcttcaaccttctgtttcaactaaactcttcaacattcttaccttggctggtcattttatatgc

SEQ ID NO: 1552 - DNA, 239 bp, Zea mays
  misc_feature: Incyte ID No: 700159036H1
gtagacagaggtgttcattgtctatctgaagaagaaagaacaaatctaatttcagatgctcccaaagacttggaggagagtggagcctctggaatccggcaacctgacaaagctgaggcaggcactgcagagtacctcattgagcttgaagaacggcgatcaattaaggtattcggttcaaacaccttcatcgggctggggatcgtcttcttcgcgggcgtgtgcttctcgctcttctc

SEQ ID NO: 1553 - DNA, 238 bp, Zea mays
  misc_feature: Incyte ID No: 700159037H1
cgcaggtgcctccgcgttccacgagttcgacggcgcctccttcgccggcgcggtgttcaacctctccaccaccatcgtcggcgcgggcatcatggcgctaccggccaccatgaaggtgctcggtctcgtccctgggctcgtcatgatagtgctcgccgcgctcctcaccgacgcctccatcgagctgctcgtgcggttcagccgggccgcgggcgcgcgctcctacagcgcggccatg

SEQ ID NO: 1554 - DNA, 238 bp, Zea mays
  misc_feature: Incyte ID No: 700159038H1
gtagacagaggtgttcattgtctatctgaagaagaaagaacaaatctaatttcagatgctcccaaagacttggaggagagtggagcctctggaatccggcaacctgacaaagctgaggcaggcactgcagagtacctcattgagcttgaagaacggcgatcaattaaggtattcggttcaaacaccttcatcgggctggggatcgtcttcttcgcgggcgtgtgcttctcgctcttct

SEQ ID NO: 1555 - DNA, 173 bp, Zea mays
  misc_feature: Incyte ID No: 700159041H1
ggggatcaagtctttctatttgataatagccctacagatgttgatgctcttttccttggacatgttctttttgttctcagtgcgttgcctgatacatctgtgctgaggggcactttgcagaagcatgacaacttggtgagctttgctgagcatcacaaggtccagttgctgga

SEQ ID NO: 1556 - DNA, 231 bp, Zea mays
  misc_feature: Incyte ID No: 700159044H1
accaaagcactatgcgaaacttgaggtcctcattgccattggtcagtgcaagagatgtctgcaatcctgagagaaagcaattgtgccaagccatgcccgagtttcagccttttcaggtgatatagaggagcggccatccatttgttacagctctcgccgccctcccttttatgcactttttacagaggcttggaattggcaaaaaaagaccgaactttcaattgtacttct

SEQ ID NO: 1557 - DNA, 240 bp, Zea mays
  misc_feature: Incyte ID No: 700159046H1
  unsure 40, 184, 190, 207-208, 210-211, 216-217, 219-220, 224-225, 227-229, 233,236: a, t, c, g, or other
ggagctccttgggtgggagccgaagatccccctccgcganggccttcccctcatggtcaccgacttccgcaagcgcatcttcggcgaccaagacaccgcggctgccaccaccagaaaccagcaaggctaggacggaagaggagcacgggacttggaaatttttggtggcctgcttctagctgcntggtcnaccctcctctccttaannannaaaannanngccnngnnngtcntcnggga

SEQ ID NO: 1558 - DNA, 246 bp, Zea mays
  misc_feature: Incyte ID No: 700159047H1
  unsure 128: a, t, c, g, or other
cgcgtctcctccttcccttggctgctgtcgtgccggtcggcggcgacagcaagggagggagcatgtcgaagaagaacaatcttgccaagaggaagaagcagtacgagttcgacctccaacgggagaangaggccaaggagaagcaggccaagaagctgcaagccaagaaatccaagatgaagatagatggtgctgaaaagaaacgtaaaggtggccaatttaaggtcggcaagaaaaaggtgaaga

SEQ ID NO: 1559 - DNA, 249 bp, Zea mays
  misc_feature: Incyte ID No: 700159048H1
ctcctccagggccgcttcgccggcaggaaggcagttatcgtgcgcgtgttcgaggagggcacccgcgaccgcccctatggccactgcctcgtcgcaggcctcgccaagtacccaaagaaggtgatccgcaaggactccgccaagaagactgcgaagaagtcgcgcgtcaagtgcttcatcaagctcgtcaacttcactcacctcatgcccacccgctacaccctcgacgtcgattttaaggatgtcgcc

SEQ ID NO: 1560 - DNA, 238 bp, Zea mays
  misc_feature: Incyte ID No: 700159049H1
  unsure 168-188, 228, 230: a, t, c, g, or other
cctgaattgaacgtggtagtgtttatgatgattagatgtctaggctttctatgtttgcgtgaatcgtttctgctggattgtccattgtcatcaccaccttatgttcaatactttaaatcttgcgcaggtgatcgtcggtgctgtcggtggtggtgcaatgatggtgannnnnnnnnnnnnnnnnnnnnctgctgcatctggtggtgctgctgccgaggctcccaagangnaaagaagg

SEQ ID NO: 1561 - DNA, 273 bp, Zea mays
  misc_feature: Incyte ID No: 700159053H1
gttcagctcatttgtggatcttatgggactcgtgacgaagctcgtcgaagaatatggtgtggccacgggagggcattcttgaatcttgatgaaccatctcatacacggcattgcggagttgattttagttcgcctgtgagcaatttggagttttggacagtctttaccagtggaactgctcttgatctgtgtcaagctaatgtagtatttgcccttgattggtcaaatcctattcggaacagttaattcttttcggcaatgccgttgcgaaat

SEQ ID NO: 1562 - DNA, 275 bp, Zea mays
  misc_feature: Incyte ID No: 700159054H1
  unsure 174: a, t, c, g, or other
aagcggcggaggcgctgtcatccgctggtccctttcctttccgcgcgcatggcgagaatcttggccgccgtctggccgatcgttaaaggcatcaccggcggcgtgttcggcatcaccatcgccgactggagcgcctcctacgtcaccttgcacggcgcctccatgcaccccacnttcgacccgcagcaggccgaacgcgctctggtagataagcgctgcctccaccgctaccacttctcccgcggcgacgtcgtcgtcttcaggtcgccgaggga

SEQ ID NO: 1563 - DNA, 275 bp, Zea mays
  misc_feature: Incyte ID No: 700159056H1
  unsure 95-96, 98, 114, 116, 122, 209, 215, 242: a, t, c, g, or other
ttcctctcccaccaccaacccccagatcgcagcgatctccgccgccgccctctctgggattccgcgcgacaaagtcaggcgtagaggctccaggnngnggagggaggcgcacangncgggtnggggagatgttcctctgggactggttctacggggtgctggcctccctcggcctgtggcagaaggaggccaagatcctcttccttggnctcganaacgccggcaagaccacgctgctccanatgctcaaggacgagcggttggtgcagcaccag

SEQ ID NO: 1564 - DNA, 277 bp, Zea mays
  misc_feature: Incyte ID No: 700159059H1
gaagccctaggctcccggctccagctgcatacgttccaggagctaaacaaagtaaccggcgacatgtgcgctgggaccagaacgacgaagaggatgaagacgccaatggaggggaacggtggcacgccggacttgcacctaagcttgagccccaacgacgacgacatgggaggagctgccgacaagcagatgaagaagatgaagatccaaggtatcggattaagtgaacagcaggaggtggacaacgataagatgctgcctctctcgctctccctgt

SEQ ID NO: 1565 - DNA, 111 bp, Zea mays
  misc_feature: Incyte ID No: 700159060H1
  unsure 2, 38: a, t, c, g, or other
cnagacatcgtgaaataataataataagagcgcctganatgtgatcagtggtgtactcgccattaagcacctgtggcaaccgatgagctgaactgtgttggactgttggat

SEQ ID NO: 1566 - DNA, 278 bp, Zea mays
  misc_feature: Incyte ID No: 700159063H1
ctgagacgtcaattaattttggccgtggtttacatggcctaatatgttatgagcaagaaaaaagaaacgggtgataactcagttgaggatgtgggagaccatctagttttcgaggtgaatttaggcatctatttttgtaagttacagattggtctagctttgttctttgttacaaggaaaaccagagtcatgcgtttactaacacattctgagttgtcattgaggatttgggatatcctaagatcctaggtgagtagcctaaaccgtatatttcgttg

SEQ ID NO: 1567 - DNA, 282 bp, Zea mays
  misc_feature: Incyte ID No: 700159064H1
  unsure 64, 253: a, t, c, g, or other
aaagtctttcccttctatccttcctcccccctgatccatcccattcggccaccagcgacaggantgggctcacgctacgaggtggaggtcaccgtgggctccgcccgggacctcaagaacgtcaactggcgcaacggcgaactcaagccgtacgccgtcgtctggatcgactccggtgccaagtgctccacccgcgtcgacctcgacaacggcgagaacccgacgtgggacgagaagctcctcgtcccgctcncgcccacctcccgcctcgacgaggcgtct

SEQ ID NO: 1568 - DNA, 98 bp, Zea mays
  misc_feature: Incyte ID No: 700159065H1
  unsure 2, 5, 44, 53, 62, 72, 89, 91, 93: a, t, c, g, or other
anagngctaacaccactcattatccatagaaaaccatcacacgngaagcatgnccggccgangatccaccgngcgcagtactacgtacnananatttg

SEQ ID NO: 1569 - DNA, 271 bp, Zea mays
  misc_feature: Incyte ID No: 700159067H1
acgacacagctctccaaggcgccacacgcccaaagtcagtgtctaccttgacctctgacgaagctggtggcgaaataggtgacaaggttcttaccgagcatggattctttgtgaaccgatcgcgtgttctgctcggctcaggttctgacgcctttgtccatgccaaatccgccctcctctcatggaggcacttggctttagggtgggcgaacgtggaaccggacaccccggtgaaggttggtacaaggttctgcatctgctacaaggagtt

SEQ ID NO: 1570 - DNA, 271 bp, Zea mays
  misc_feature: Incyte ID No: 700159068H1
gcggcaacaagcggtacgtagaggatgaagagcaggagcagcactctgttggtgatcctagttctccaggcccttctgctctctgcggctgtggccaaaggacctgcagggccgaagaagcagtgctggtgcggcgagtgcaccagctggtcgggcgtgtggacctgcgacgacctcctcaccaagtgcgccgccacctgcaagaactgcgtccccgtctccacggacaagggcgccaccaagtacagatgccgcgacttcctccccgaaa

SEQ ID NO: 1571 - DNA, 270 bp, Zea mays
  misc_feature: Incyte ID No: 700159071H1
  unsure 11: a, t, c, g, or other
gcctgcaaganatgatgctggactggcagcagctgaattagcattagcagtcgagaaacatgtcctggaatcaggatcaattgatacggttggcaccgttggtattctgcagttacatccaggagcaatcaatagcatcccaagcaaatcacacctagaaattgatgtaagagatattgatgagaagagaaggaatgatgtcattgagaagattcgccagtctgcagcacatatttcaaagaaccgtggagtagagctttcagaatttaa

SEQ ID NO: 1572 - DNA, 271 bp, Zea mays
  misc_feature: Incyte ID No: 700159074H1
gacgcctgcggacgtcgccgagaacttgacgcccaaggcacccggcgaggacgccgactcgtgcctcgccgcgcttgtcgaggcactggagaaggctaaggaggacgcgctggcgaagaaggccaaggggaaggaggaggccggctccgccgatgagctcgacgacgaggagtagctggtggctgctgttgacttcttgttagttgctagtgctacatatgtagggagcccctgatctggttgctggtctcatctcatgagcgaagaataa

SEQ ID NO: 1573 - DNA, 271 bp, Zea mays
  misc_feature: Incyte ID No: 700159075H1
gaactggggttgattggattgcgtatccaaagaatgcctagtgagccaaacttggaatttggtattccttctcagtatagctatatgacggtttgtgctccctcatgtcatgactgctctacattacgtgcttggtgggaagaagatgaaggaagaagaagtcgtttctacaagactgtagttggcagtgatgaggaggccccatctcgttgcaccccggaagtagtgcacttcattgttcagcagcattttgacgctccatcaatgtggg

SEQ ID NO: 1574 - DNA, 273 bp, Zea mays
  misc_feature: Incyte ID No: 700159076H1
  unsure 268-269: a, t, c, g, or other
gaagaacagacacctaccccaaagaagactgaggtagtagttggcaagaagagggcaattgaagctgagacaccttctggtaagaaggctaagtctgaacaatctgctcagaaaacaggcgacaaggtctcaacttctcatcctgcaaagcagtccagcaagactcctgcagacaaatctacaaagacccccacagctgacaagaagtcccccaaatctgggagccatgcctgcaagtcatgcagcaaatctttcggcagtgcgtcannttga

SEQ ID NO: 1575 - DNA, 273 bp, Zea mays
  misc_feature: Incyte ID No: 700159077H1
atccagatcatgagcttgttgagatgttttgggaggtcttgaagagcttaagttcagacaaccagaaaaaatttctcaagtttgtgactggatgttctcgtggccccctccttggatttcagtatctcgaaccgaaattttgcattcagagagctggtgttccaggtctggaggagcatgcagaccgcttgccgacatcagctacctgcatgaaccttctgaagctccccccctataaaagcaaggagcagatgcaaaccaaactattgtacg

SEQ ID NO: 1576 - DNA, 265 bp, Zea mays
  misc_feature: Incyte ID No: 700159081H1
  unsure 243, 260-261: a, t, c, g, or other
ctcgtatcgtcgtctagctccgtttcgtttccgggaagcaaccaaccttcgttcccgggcagccgacgacccttgcgccgtcttcgtctgtcaagagtacagtttgacgcgagcagctggctgttccttctctcgtgcgcctttgctagctttgggatcgatcaaagccggtgagcgagcgagcgagtgaggaccggaacatctgccagcatcatggcctccgagcatgcgcagtgttctgcnaaggccgccgcggcagnntgtt

SEQ ID NO: 1577 - DNA, 263 bp, Zea mays
  misc_feature: Incyte ID No: 700159083H1
ggaacattcggctatgttgcgccagagtacgccatgacgggtcatcttcttgtaaagagtgatgtgtacagttacggagttgtattgcttgagctcctcactggtaggaaacctgtggatatgtcacggcctgctgggcaagaaaacctagttgcatgggctcgaccgcttctaacaaatgttctgagcctacgccaagctgtcgatccacttcttggacctaacgttccactggacaatgtagcaaaagcagctgccatcgc

SEQ ID NO: 1578 - DNA, 264 bp, Zea mays
  misc_feature: Incyte ID No: 700159084H1
gtgctgcttgccccaatgtgcaagggttattgtatattaacaaccaacagtagtgtcgaaggagcacaagatgatgtgtgagcacaaagtggccagcaagaatggagtcatggaacatcggcaggaggggtgcgacagcggcaaccgatgtatcccttggacaatctggttttgacatgatgcaaatcaatgtgctgtacattgtattctgcacttgcacagattgtttggctaattacaggattatctcaatgttttggtttg

SEQ ID NO: 1579 - DNA, 224 bp, Zea mays
  misc_feature: Incyte ID No: 700159088H1
  unsure 140, 143, 147-148, 150-154, 157, 159, 164, 218, 220, 222-223: a, t, c, g, or other
gtctggcaatttatgaatgccatgtctgccaatctgtatagcttccaataatggtctgaccctagactagttttgttttccacgttcatgtagatagctagttttgtgtgctcatgcaattttttactgggtggagcctngancganntnnnnntgntntatcncttctgcacgcgtgtatgtaagtatgtggaaccttgtaatgcttgaggtaaaanananna

SEQ ID NO: 1580 - DNA, 265 bp, Zea mays
  misc_feature: Incyte ID No: 700159089H1
  unsure 81, 83, 97: a, t, c, g, or other
aggtggtggtgcaccgggacatcaaggccagcaacgtgctgctcgacaaggagatgaacgcgcggctgggtgacttcgggntngcgcggctgtacgnacacggcaccgacccgcacaccacgcatgtggtgggcaccatggggtacatggcgccggagctgggccacacgggcaaggcgtccaaggcgtccgacgtcttctccttcggcgccttcatgctggaggtggcctgcgggaggaagcccgtggtgcaggacgagcgcga

SEQ ID NO: 1581 - DNA, 271 bp, Zea mays
  misc_feature: Incyte ID No: 700159095H1
  unsure 163: a, t, c, g, or other
gttgattaatgctaatcctataatccatgagaaaaaagagaggcgtgccagacaggcaccagagaccacagatgaaaatgcagcagagcccatagatcagctggaaatatttgatatccttcttaatgatttcttcaaatgtagtgaagattgctgttctatntatctgagttctctatcctagccatttaattgtggtccttattgttcttacatcacattagagatataaaggatccagagcacccgtactcactggaacagctgaatg

SEQ ID NO: 1582 - DNA, 206 bp, Zea mays
  misc_feature: Incyte ID No: 700159096H1
  unsure 106, 133, 176: a, t, c, g, or other
tggtggaggacgtgaggcaggccctgtacgcgtccaagatctgcagctacgcgcaggggcatgaacatcatcaaggccaagagcgcggagaaaggctgggggctcnacctcggcgaactggccaggatctggnaagggcgggtgcatcatccgcgccatcttcctggaccgatcangaaggcctacgacagaacccgggcctcgcc

SEQ ID NO: 1583 - DNA, 274 bp, Zea mays
  misc_feature: Incyte ID No: 700159101H1
  unsure 238, 252, 269: a, t, c, g, or other
caccaagtacgaaaaggtcattttcccacctaggctatgcttcttagggggtcttaccttcatgggtaaaaacgagatgccagttacctttccgtattccacaatgcttaagaaactggacttgcagttcactttcctcaccactgaagaccactgtcagcttattgctaaatgccccaacctaagtgttctcgaggtgaggaatgtgattggggatagaggactggaagttgttgcngctacatgcaagangctacgagggctcaganttgag

SEQ ID NO: 1584 - DNA, 179 bp, Zea mays
  misc_feature: Incyte ID No: 700159103H1
gttcggccgacgtatcatcaatttttgactgatttttgcaaggagcttactggcatacaacagattcaggtggacagaggtgtgcctctaggtgaagccttactcatgcacgataaatggctagaggacaagggcatcaagaacacaaactttgctattgtgacctggtctaactggga

SEQ ID NO: 1585 - DNA, 108 bp, Zea mays
  misc_feature: Incyte ID No: 700159105H1
cgcagaagcgcttgctctgtacggtctcattgttggaattatcctttcatcccgtgctggtcaatcccgagcagattaagtgcactaccattctgcgattaccgtact

SEQ ID NO: 1586 - DNA, 180 bp, Zea mays
  misc_feature: Incyte ID No: 700159107H1
  unsure 54, 173: a, t, c, g, or other
ggaagtcggaaagaatccctcctgttcttcgtcaaccctccagaacctgctctntcttcctctacgagactacgaccgtgtaaggacatggccgtcgagcgcttgaagaccgggttcgagcagttcaaggccgacgtctacgacaagaagccggagctgttcgagccactcanggcgcac

SEQ ID NO: 1587 - DNA, 177 bp, Zea mays
  misc_feature: Incyte ID No: 700159108H1
  unsure 131, 173: a, t, c, g, or other
ctcagatatggcagaattatcaaaacaagcacttggctctacggaggattgtctgctcgagtctctgatgggttgcttggcatctccttctcctcttggagctggcgggaggggcccccacatacaggganttgagctacctgcctgttgattgatatcttacttccacagcnagtt

SEQ ID NO: 1588 - DNA, 99 bp, Zea mays
  misc_feature: Incyte ID No: 700159109H1
aaataaataaacttataagtggaagttatggaattagggaacctttggatattatttggtttcttttgcttttgaatattcaattaaatgggattaagc

SEQ ID NO: 1589 - DNA, 66 bp, Zea mays
  misc_feature: Incyte ID No: 700159110H1
gtccgttttcctagactctgatgctgtatgcaactgaaacaagtaaatctatgatcttaaggctgc

SEQ ID NO: 1590 - DNA, 179 bp, Zea mays
  misc_feature: Incyte ID No: 700159112H1
  unsure 84, 168: a, t, c, g, or other
ctgatcgcgctggtgcagacagggtccgggaagacgggcacattcatgctgcccattctgcagaagttgctgagcaaccgccangccgagcagtctttcttcgcttgcgtgctctcgctaatgagagagctggttattcagatcgtggagcagtttgaggcgctcggntcaactattgg

SEQ ID NO: 1591 - DNA, 139 bp, Zea mays
  misc_feature: Incyte ID No: 700159115H1
aaagaatctagcagctaggagcaggccgtgtatacgccatccaccacggcaacatgtgctccggctcctggtcctggagcagcagcaagaagcgcccgtctcttgttgtcgtcaacctcaagcggcagcagctgcagaa

SEQ ID NO: 1592 - DNA, 125 bp, Zea mays
  misc_feature: Incyte ID No: 700159117H1
  unsure 10: a, t, c, g, or other
caccactgcncgaagccccctcctcgctgacttggctcctccgccgtggccggagggaagaagtgtaaaccagcccaccctcctccccgtctcctctccctccccatgcgctgttttgttctgta

SEQ ID NO: 1593 - DNA, 125 bp, Zea mays
  misc_feature: Incyte ID No: 700159119H1
ataaaacttacggaaatcgcctggccagcatgttaggctctatcccagctccacctgcaatggcctcagaattcccgccgtcaacagggaaatctgctgggatgctttcggctgtcagctcgagt

SEQ ID NO: 1594 - DNA, 125 bp, Zea mays
  misc_feature: Incyte ID No: 700159121H1
acctcctacaactgcaaccactccaaccgttggattaggcctcctcttctctgtatacatagcactatctatgggaagtgccctgtgtgttttgtctcggtccttgcttgtgtcactaattggtc

SEQ ID NO: 1595 - DNA, 258 bp, Zea mays
  misc_feature: Incyte ID No: 700159122H1
  unsure 207, 223, 226, 239, 242: a, t, c, g, or other
ggacgagattgagcgtgttgccaaggccaaccgttgaacggagcttgtatcctggtgcactctgcgctggaaacttttatgttgctggcagtcgtatcggttcctgttttaccaatgtttagagttttttgagacctatatgcggttttggttttcagtgcacaattaaaattactgagtaatgtagttgattgggaacagaaagtncctggtttaccgaacnccntttcgcttgtcanttnctgatgctgtagtctg

SEQ ID NO: 1596 - DNA, 124 bp, Zea mays
  misc_feature: Incyte ID No: 700159124H1
  unsure 20, 93, 112: a, t, c, g, or other
catggttctgcgtaggcganattgttggcagaggtttcaccttaaccggctataaggtctagttgatttccagtgatttaagacctgctttanaaatcgacactttagctgntgcttgtcgaaa

SEQ ID NO: 1597 - DNA, 126 bp, Zea mays
  misc_feature: Incyte ID No: 700159125H1
  unsure 56, 91, 95, 101, 122: a, t, c, g, or other
gtcagcccctctcgtttttcatccgccttcgcctccaaccgcgtgcgctccacgcntcctccaggaaagcgagagcttctgcataagaacnacanatcaanagcgtgatcagctcggtgccnacaa

SEQ ID NO: 1598 - DNA, 262 bp, Zea mays
  misc_feature: Incyte ID No: 700159126H1
  unsure 243: a, t, c, g, or other
gtgttacacttcgaggcacaaaattttcgctcccaatgcctcaaggtggaagagatgccataactaagaaccccattctacgtgaggaccagcttcctcagaaggttcttcatcctaaattgaagaagtccagcaaggcggatgatttcttgggcgttgaggacatattctcgcacagtggtgataagaaggcgtcactgaaacctccagttggcaaggcactggcaatgttcagcgggaaanggaatccgaacgacaacct

SEQ ID NO: 1599 - DNA, 67 bp, Zea mays
  misc_feature: Incyte ID No: 700159127H1
  unsure 62: a, t, c, g, or other
ctcgttcaaggatgcaagtatatttcttgtttaactgcacattactttatatttatgcctgnttcat

SEQ ID NO: 1600 - DNA, 113 bp, Zea mays
  misc_feature: Incyte ID No: 700159129H1
  unsure 14, 52, 63, 88-89: a, t, c, g, or other
gtaagagccaatanaacatatatacgcccagtggaataaactgaattacctnagtactctcgnctactcatgtatctatgtctcacgnnatactacctccgttgtccgttctc

SEQ ID NO: 1601 - DNA, 120 bp, Zea mays
  misc_feature: Incyte ID No: 700159134H1
gtggtcacccaagttcactgtgattgttgctcaaaagaaccatcacaccaagttctttcagacggcatcaccagacaatgttcttcctggaactgtggtggatagtaaagtttgccatcc

SEQ ID NO: 1602 - DNA, 119 bp, Zea mays
  misc_feature: Incyte ID No: 700159136H1
  unsure 18, 49: a, t, c, g, or other
agcagtagcattcagcantccatttgttcaaattatctgtcgctagcanataaacccatgaccaaactctgttcgtcagcatccactgagcggcgaaatatttgggactgggacacaca

SEQ ID NO: 1603 - DNA, 118 bp, Zea mays
  misc_feature: Incyte ID No: 700159138H1
atagaaacgacatatattattaagcatgggttccctaggctcaagcaccattagcagcatgaacatggcgaacaggcagccaccaccgttggtgctaagaacggcgctgttgctgtcg

SEQ ID NO: 1604 - DNA, 253 bp, Zea mays
  misc_feature: Incyte ID No: 700159141H1
  unsure 242: a, t, c, g, or other
ggacctgacacgggaacaaactacagagaagataaagaggtcttcgagatcagcgcgaagggtgcttttatttttattatagtagcttcagttttcctcctccttctgttctacttcatgtcatcttggttcgtttgggtgctaattgtactattctgcattggtggtattgagggtatgcatgcttgcttggtcacgcttctagctaggatttttaaggactgtggacaaaagactgtacnactccctgttt

SEQ ID NO: 1605 - DNA, 269 bp, Zea mays
  misc_feature: Incyte ID No: 700159149H1
  unsure 139: a, t, c, g, or other
agatcaacgacagtgtgtgaacgtgtggcgatttatccaaactatcaacgagagaaaagacttgacagagaacctgaagcagctacagtgcaggacactaatttttgttggtgagaattcccagttccatgctgaagcngttcacatgactgcaaagcttgataggcgatatagcgctcttgtggaggtacaagcttgtggctccgttgtgacagaggagcaacctcacgcaatgctgataccaatggagtactttctcatgggatatg

SEQ ID NO: 1606 - DNA, 262 bp, Zea mays
  misc_feature: Incyte ID No: 700159150H1
  unsure 160: a, t, c, g, or other
caggtgtgctgcctcagtatcatcgacccaggtgactcggacatcatcagtaccacccctggcacccagtgagccagccccggcacccattgcagctgcttcgcctttctcaagatgagatgagatgtagcgctccggccctatgtccgtttcctttttntatctttagctatgtaattttgctaccatgtgtccatctaccatactgatagtacctcttattatggtgtatgcaaggcatatccatggttttgtttgatga

SEQ ID NO: 1607 - DNA, 263 bp, Zea mays
  misc_feature: Incyte ID No: 700159151H1
  unsure 92, 124, 187, 195, 220, 222-223, 246, 260: a, t, c, g, or other
cagcacacctggtgattatgttcgcgcccggatcttggtgcccctgaaatctgggtgtgacattgataactagtgcccgtgagcctgtctgnctcgcacactaatttaacaatgtcatgttacntgctgcaccacccgttcggccacaatctatcgctaatcgctactggctggcgcctgacggtcnagcccgtngacgaactgccagtcgagatttgtngnncagcgggcgcaagacgccctgantctgattccgggtnaat

SEQ ID NO: 1608 - DNA, 263 bp, Zea mays
  misc_feature: Incyte ID No: 700159154H1
  unsure 145, 209, 247: a, t, c, g, or other
gagttcgaggactccgttgcccaggctttctttgatctggagaacgggaaccaggagctcaagagcgacctcaaggacctgtacatcaacaatgctatccagatggatgttaccgggagtaggaaggctgttgtcattcacgtcncataccgcctgcgcaaggccttcaggaagatccatgtcagactcgtcagggagctggagaaganattcagcggcaaggatgtggtaattgttgctacacggnggattgtgaggccacc

SEQ ID NO: 1609 - DNA, 263 bp, Zea mays
  misc_feature: Incyte ID No: 700159156H1
  unsure 87, 107, 127, 165, 175, 184, 192, 202: a, t, c, g, or other
gtgagaatatcatctggaaggcatttagccccacaaccatcaacagtggtcgtggtgctgaattcgaaggggctgtcattgcactgntccatctgttgattacgagnaccgataaagtccgtgctcntcgtgaggctttctaccgccagaaccttccaaatgtgnccaatttgcntgccactgncttggtantcctcatagntatctatttccaaggcttccgtgttgtgcttccagtgagatcaaagaatgctcgtggccag

SEQ ID NO: 1610 - DNA, 262 bp, Zea mays
  misc_feature: Incyte ID No: 700159157H1
ggaggatgagaccagaggaggagacgtcacgcctgcgcggctgcgcccaccatggacgaggatgagtttcggcgcatgctcgacctcttcccggtcgtccgctcccgagactactgctgctccgatcttggaacatccagcagaggaaccagacagcgatcacgagttcaggaggcaactaagggcgataataaggactcgtccggtggacgagatatgtttatgcagaaattgaagatggctgcggagaataagattggag

SEQ ID NO: 1611 - DNA, 262 bp, Zea mays
  misc_feature: Incyte ID No: 700159159H1
  unsure 166: a, t, c, g, or other
aggggattgaatctgttgtcgggaaagaaaacctgggctcagatgtcatgtgctcggcctgtcagatggctgtcgtgtggatagagaaccagctccgcgaaaacaagaccaaggagctcatactgcagtacgctaaccagctgtgtgagcgtctgccgagccccancggagagtcaacagtcagctgccaggagatctccaagatgcccagccttgcgttcaccatcgcaaacaagaccttcaccctaacacccgagcagta

SEQ ID NO: 1612 - DNA, 258 bp, Zea mays
  misc_feature: Incyte ID No: 700159162H1
  unsure 175-176, 189: a, t, c, g, or other
gcaacgcgtttagttgccgcatgtgactactcgcaaatcagatgtgtaggagaggggcgagcggatcacgagttgctggagccggggaggaagaagcgggcatgagcttggaggggacgaggaaccaaggccagcaccaaggcgcggggcggcgctagggttggacggtgctggnnggcggcggtggtngcgcggggcggggcagcgacgaaattggttcggcggcgatgtaattggcgcgacggcggcgacggtgga

SEQ ID NO: 1613 - DNA, 258 bp, Zea mays
  misc_feature: Incyte ID No: 700159164H1
  unsure 213, 226, 233, 237, 252, 256: a, t, c, g, or other
cctcccgacccactcgcccaaaaccgtagcgccctcgcctgctcgccgccgccgtcgttgcgagctccccatcttcctccgttaaccatggcgacccagatcagcaagaagaagaagttcgtcagcgacggcgtgttctacgccgagctcaatgagatgctgacgcgggagtcgcggaggacggctactccggcgtggaagtgcgtgtcacancgatgcgcacggngatcatnatcngggaacgggacgcangaangt

SEQ ID NO: 1614 - DNA, 257 bp, Zea mays
  misc_feature: Incyte ID No: 700159165H1
  unsure 159, 193, 241: a, t, c, g, or other
gtgagcctgcccaagggcaagggtatcaagctcagcatcatcgaggagcagaggaggcgcgactttgctgcccaggctgctgccaaggcataagttctctgaatgtgctgcttggagctttttgctatgtctagttttatttttatctgcaaggatatngagctaccttcccaagacgttttatcatcatgtnttgttgcttttggttcttgaacagcgtttgcagctactgtaaggcttnaattcgactttcaata

SEQ ID NO: 1615 - DNA, 260 bp, Zea mays
  misc_feature: Incyte ID No: 700159167H1
  unsure 135, 145, 165: a, t, c, g, or other
aggagatctcgagcaaggcggaggcggaggagatgaagacgttcgacccgtggccggtcttcttccgccgggagtggaagcgcaactggcccttcctcacgggtttcgccatcaccggattcatcatcacgaagntgacggccancttcaccgaggaggacctcnagaactccaagttcgtccaggaacacaagaagaagcactgacgaaccaggtgaaggagttgtcagaaacgcatgtttggccagccagttctgtta

SEQ ID NO: 1616 - DNA, 260 bp, Zea mays
  misc_feature: Incyte ID No: 700159168H1
gccgccaccaggtgcagagtctttcgtcatctcttctccggcgaagaacccccagtcgcccaccagatcacttgttaaactttgttgaggggtgatggcggtttctttcgcaaacctcaactccgaggcagggcttaaaaagcttgatgagtaccttctcactcgcagctacatcactggctaccaagcttccaaggatgacttggctgtctacacttcgttttcggctgctccctcgtccaagtatatcaacgtagcaa

SEQ ID NO: 1617 - DNA, 256 bp, Zea mays
  misc_feature: Incyte ID No: 700159170H1
  unsure 72-97, 102, 107, 116, 150, 204, 228: a, t, c, g, or other
atccatttcggcatttccaacgccttcgccctaccagccacgtcgcttcgaggccgatcgaccgagcagctnnnnnnnnnnnnnnnnnnnnnnnnnntcgtnctgcnggacttctnggtgagccccttcgggcagcgctgccggatcgcnctggcggagaagggcgtggcctacgagtaccgcgagcaggacctcctggacaanggcgagctgctcctccgctccaancccatccacaagaagatccccgtcctgc

SEQ ID NO: 1618 - DNA, 86 bp, Zea mays
  misc_feature: Incyte ID No: 700159171H1
  unsure 77: a, t, c, g, or other
gttaaagactggtgtaattgaactatgggaagagctgctttggttgtaaccatattttgatgcccgtatattaggcnaaaatagag

SEQ ID NO: 1619 - DNA, 257 bp, Zea mays
  misc_feature: Incyte ID No: 700159172H1
gaaagagagggaggctcggctggaacggaataaaaccagatcactctttgggtgaacaatggcgtcccacctgagcaatatgctggcggtgcaataagtctcctgctgatgtgagcgaaatcacggcttttttctttggtttcatgatgatcctctgcaacttgtgcaaggtagggaatagaaatactgatctctagattgagggagatgtaagggcgtctgagaacagctcattaacacaatggctacggtgaatg

SEQ ID NO: 1620 - DNA, 255 bp, Zea mays
  misc_feature: Incyte ID No: 700159175H1
agtacattcaaatcggacaaactaccgctagggactgtctcatccgtttctgccatgcaatcatctcatgctacaaccaacgttacctccgtattcctaacagaaacgatgttgctcgcatacttcgtgtcaacgctgataggggtttcccgggcatgcttggctcaattgactgtatgcattgggaatggcgtaactgtccaactgtatggcggggtcaattttgtggccggaactcacgtccaaccatgatat

SEQ ID NO: 1621 - DNA, 252 bp, Zea mays
  misc_feature: Incyte ID No: 700159177H1
  unsure 6, 51, 57, 63, 75, 94, 157, 217, 243: a, t, c, g, or other
ggacgntggtcgggtccgccagaactctggcccagaatctaccgtcgaccngaaganccctanaaaaccctagtngcatccacaattccacatnacctcgcccgcgccgcctcccccacgagacgccttcttgctctcgcttccggtgacgcccgcnacttcctccccgacgagatgacgaaacgcaccaagaaggcaggaatcgttggcaaatatngtaccaggtatggtgccagtttacgnaaacagatc

SEQ ID NO: 1622 - DNA, 253 bp, Zea mays
  misc_feature: Incyte ID No: 700159178H1
  unsure 192: a, t, c, g, or other
ccgcaatgtagtgtttgaagaagaggattagtgttcagactctcaggcttaccatctcagtaagcgtacaaggcacggtttttggtcgtgtgatgtttgcatgtgtgtaagatatgtttgttctgtaccgcgtgtggtgggtgggatgaagtgacccgccggcgctggcttgtaacctcactgttgccaganaatagaaaacgcactgcgacatgcacatgcttttgttttgtgcctgttgagcaccgcaaaa

SEQ ID NO: 1623 - DNA, 246 bp, Zea mays
  misc_feature: Incyte ID No: 700159179H1
  unsure 39, 43, 65, 84, 137, 163, 184, 212, 218, 226, 234: a, t, c, g, or other
gttccttgcatcagtgcaaaaaacatggatctgatagtnccangtcaacaatgttgatataaganccaccgcaactagcaccgntaccttgttgcggtgctcttagatcaacattgttgacttgggactatcagatncatgttcctttgcatcagtgcaaaanaatgcggaccgagtttgaacncattggtggcagcgaaagccaattcagncagganttttttgnctagtganatctgctgtggt

SEQ ID NO: 1624 - DNA, 255 bp, Zea mays
  misc_feature: Incyte ID No: 700159180H1
  unsure 172, 174, 199, 206, 227, 229, 236, 245, 247, 251, 253-254: a, t, c, g, or other
gtgcagggacacaagaaacgaaaggctacttctgcacatctccaaaagcttcaacaggagttgagtgatctcttgcaatgcccattgcagcctaagactttttctcgacgctatttggctggggctggtgtctcgccattacttcagaagcaactagaagagttggccaagngnaacgcaagcaacaatagcagccagnttaggantaaaggatctgggtttgttgnanttggccnggtcggtcnangccntnna

SEQ ID NO: 1625 - DNA, 255 bp, Zea mays
  misc_feature: Incyte ID No: 700159182H1
  unsure 78, 167, 171: a, t, c, g, or other
ggtcggccacgcacctttaagaagaaggaggaagaggaagatgaggaagaggtagaaagagaagagtctgaggaagantctgaagaggattctgatgaaaagactaaacataaaggcactgagggtattattcagattgaaaatccaaacttggtgaaagccaagantatnaaggccaaggaagttgattttggcaagacaactgaactctcaaggcgtgaaagagaggagcttgagaaacaaaaagctcatgaa

SEQ ID NO: 1626 - DNA, 105 bp, Zea mays
  misc_feature: Incyte ID No: 700159183H1
ctaatacaagttcatcaaagttttgtccgaatgccataattctgtcataaaatttactttctctgtaatacacaatgaatctaagtgtttacttcattattcaaa

SEQ ID NO: 1627 - DNA, 252 bp, Zea mays
  misc_feature: Incyte ID No: 700159184H1
  unsure 76, 92, 141, 166, 180, 221, 233: a, t, c, g, or other
atccaaattgtgggtgatgatttactcgtcacaaacccaaaacgtatagcagatgctattgataagaaggcttgcnatgctctgttgctaanggtaaccatttactaaacaatctgaaatggagtactatatacccttaantttttttgcttccttccagttctcnacatcatgactgcnaaacagtatctagctcgagataagcttgcactgcaaaactnaatgtctttgtnaaagttggtgtaccttttt

SEQ ID NO: 1628 - DNA, 253 bp, Zea mays
  misc_feature: Incyte ID No: 700159185H1
  unsure 58, 94, 115, 122, 127, 141, 184, 187, 217, 236, 244, 247: a, t, c, g, or other
gattattcttcaaggaatatgctgacagaattgcaagagctccacaaaactgaggtcnacaagttcatgacccaatggtgtgaaagtaaggccntcagagaggactacgagaagngaatccncacanccctaaatagccgncagctgactcgagatggtcggatgaggaatcctgatgagaagnccntatttatcgagtcacaggcgccagctccanctccagagcccatccctgnaaaattgnctncaaaac

SEQ ID NO: 1629 - DNA, 251 bp, Zea mays
  misc_feature: Incyte ID No: 700159186H1
  unsure 99: a, t, c, g, or other
ctctgcttaagaatgtcatgagactttccatgacatcgttgaaaggtgcggacgccaaagatatatcttcttccgtgacggcaattgctaacgagaagntcaaggctgagaaggaggctgcagcaggcaaaaagaaacaaggagcgaaaaagaagcaactccacatcgagaaaggagacgacgacttcatccccggccggggtggtggctacgatgaccccgatgagtacgacttcatgtgatctggctgg

SEQ ID NO: 1630 - DNA, 91 bp, Zea mays
  misc_feature: Incyte ID No: 700159187H1
  unsure 4, 25, 38, 57, 80-81, 85-86: a, t, c, g, or other
gatncagctacctaagttctgctcnttaccgttgtganaccatcattttgttttatnatctcatatctttcctagaaaannaaannaaaaa

SEQ ID NO: 1631 - DNA, 247 bp, Zea mays
  misc_feature: Incyte ID No: 700159191H1
  unsure 235: a, t, c, g, or other
cctcgtcgtcgcctcgctgtctcctccgccgttgcctgcgatccccatcatggagggcgacagtaccaacctcgacgcggctatagagtcgctcctgaacgtggagaagcagatgaggctggccggcgatgtcgccgcacgcggaaggccgtcatcgacatcgtcgagctctgctacaaggccggcgcgtggaagacgctaaacgaccagatcgttctcctctccaagaggagangccagcttaagc

SEQ ID NO: 1632 - DNA, 246 bp, Zea mays
  misc_feature: Incyte ID No: 700159193H1
cgacggaggagacggccatggtggcagcgatggagctcgagatcctaggcatgaatttcgggtgcgtcctcgcggctctgtccgacgccaagatccccgacaagggctgcctgctcccgctcatctctaagctgctcggctacgccatcgtcgccgcatccaccaccgtgaagcttccccagatactgaaaattttgaagcatggaagtgttagaggactaagtgtggcatcctttgaacttgagg

SEQ ID NO: 1633 - DNA, 246 bp, Zea mays
  misc_feature: Incyte ID No: 700159194H1
agaagttgaagcgtggttttggcatgcacgtccctgaagagtttagatagctggttctagtacaggatcttggttttgctaataatacactcttcaaagctgacaatggggtggcaaacgtgtggcttctgcgggacggtggtatcaaatctcagatttcttggactggagctctggaagcagcagtacttaagatccttggtgtacggcgaaggttgtctggcactcaagaaaccaagataatct

SEQ ID NO: 1634 - DNA, 248 bp, Zea mays
  misc_feature: Incyte ID No: 700159195H1
  unsure 162, 230: a, t, c, g, or other
atgctgccaaaccggacgaatcagtgagcaccggcagcaagaatagcaccggagctgcagtcacgagggcaccgttctcagctgagaaaaaacgcaaccaccgagaaggagaaccagttgcgataatccgattgctgacatgcagtatccgtgtcgcttaangccttgttcgtttgtgccggattggtgggtcggaacgattcgtaatcggattgcttctctaatttatntaaactttgattagctgg

SEQ ID NO: 1635 - DNA, 248 bp, Zea mays
  misc_feature: Incyte ID No: 700159196H1
  unsure 182: a, t, c, g, or other
cagcacacctggtgattatgttcgcgcccggatcttggtgcccctgaaatctgggtgtgacattgataactagtgcccgtgagcctgtctgtctcgcacactaatttaacaatgtcatgttacttgctgcaccacccgttcggccacaatctatcgctaatcgctactggctggcgcctggnggtctagcccgtggacgcaactgccagtcgagatttgtcgagcagcgggcgcaggacgccctgatt

SEQ ID NO: 1636 - DNA, 269 bp, Zea mays
  misc_feature: Incyte ID No: 700159202H1
cgatggatccgaagatgacagaggtgacccagatgttcgcccgcttcaaggcggcctacacccgcaacgacctcgacgcctgcgtcaccctcctctcacagctcaaggtccatctcaccaaattccccagccttccgccctcatttgagcagacacctaaagccgtggaggagctcaaacttgcaagggacatttatgagcatgctgttgttttgagtgtgaaacttgaggaccaagatgcatttgaacgtgatttctgtcagctaaag

SEQ ID NO: 1637 - DNA, 138 bp, Zea mays
  misc_feature: Incyte ID No: 700159203H1
ggggaagctccaggagatggcggtgagcgaggcgaaggctctagtggcagtgaacgacgacatccgcggcctccgggaccggctcatgtggatgcaggccttcttgcggcatgccgacccgcggcgacggaacacctc

SEQ ID NO: 1638 - DNA, 266 bp, Zea mays
  misc_feature: Incyte ID No: 700159205H1
agctcatccctggagaatgagccttccaatgtagtaggttctagtgagggggcaaataactctctggagctgtggaaagcagaaagtgatggtagcataccttgcccaccaaaggagctaggaggctgtggcggttcgattttggatctcaagtgtttttttccagaaaagatgctttcaaatttagaagaacgagctgacagaattatgaggagcgaagtatttgcaaaagcagtagccaaaagaagtgaccagtgcccttgtta

SEQ ID NO: 1639 - DNA, 63 bp, Zea mays
  misc_feature: Incyte ID No: 700159206H1
gaaatttctggttgcctcaagtttgctgtctgagatgcttatattatttattttgttctatgg

SEQ ID NO: 1640 - DNA, 113 bp, Zea mays
  misc_feature: Incyte ID No: 700159207H1
  unsure 26, 32-33, 35, 38, 40, 42, 45-46, 51, 99: a, t, c, g, or other
cctacttagacttatgagtaattgtngcaatnngntangnanatnntactngcttgacgggattttttgagtaccagaggtttgatatgttgttttatnctgtgaacgtcagc

SEQ ID NO: 1641 - DNA, 266 bp, Zea mays
  misc_feature: Incyte ID No: 700159208H1
cgtcattcagctaccctgagttatcttccaaaccgaaatggtggtggaggaccctagcatgtgtaccttatcttctgccactgcacaacatgtgggggcatgcagatgctatctatcagcttcatccatacttgcaaagatttagcctgccttacgctttcatcgatacaatggctctgctccctgggtggcttttcctggcgatcttcatgactatatacttctttgttgtgaggcggaagtggtcgccacacttcttgcgcttc

SEQ ID NO: 1642 - DNA, 156 bp, Zea mays
  misc_feature: Incyte ID No: 700159209H1
gggctatgtaagacatggcgtgccaaactatcagtgaccactgacagctttgcaatacgttgttgtatggtcaacctgcaaacttggtgtactgctactcgtactataaataacatagggttttaaccttggttgtggtaatggtcatcttttctc

SEQ ID NO: 1643 - DNA, 269 bp, Zea mays
  misc_feature: Incyte ID No: 700159211H1
gaacccttcataaatgggcaagctgttccttatgatcctaaatatcatgaggagtgggtgagaaacaatgcccgtgccaatgacagaaaccggcgcaatgataggccccgcaactttgacaggtcaaggaactttgacaggagaagggagaacatgcaaaactaccagaacagagatgggcctcctgcccaaggtttcaatggccctccacctccacctggccagaaccagatgccatcccaccatggtcagggcaacatgcctccgca

SEQ ID NO: 1644 - DNA, 270 bp, Zea mays
  misc_feature: Incyte ID No: 700159212H1
gtctgtgtacttcggcaatcaatcagttgaccaaaggaaggaataaagaggaagatggctcggagctgcagagattggctgcagaagtactgctgaataattacaagcagcaggctccatcaaaggcgccccttatcagcagcttgttgaagaacatgaaactcagctaataccaactagctctacacattcagaatgtcctgattcgatagatagttaagttaaattgatgtggcataatgcttgtttttttttgtggcactggcacca

SEQ ID NO: 1645 - DNA, 85 bp, Zea mays
  misc_feature: Incyte ID No: 700159213H1
  unsure 5, 11, 15, 32-33, 43, 48, 52, 54, 67: a, t, c, g, or other
ccacncataanatcnagtcgccgccgcatcgnnctcccaggtnatcantagngnccaccccagtcgntcgccatgtaagcgcaac

SEQ ID NO: 1646 - DNA, 138 bp, Zea mays
  misc_feature: Incyte ID No: 700159214H1
acctactgtagtttgcgtcggaatagatatgtttttttactcttcgtggggcagttttgtactggtggattcataaggactctgattatggtgcgttcggaacttataataataagcacatgaaattttgcttcaaaa

SEQ ID NO: 1647 - DNA, 139 bp, Zea mays
  misc_feature: Incyte ID No: 700159215H1
gtgttcggttcgttcgttcctgatattggtcagcgttttcagggagaccaaaatcagttttgagttgctgtacatagcctgctttcaacagattgtttgtatatagtcaccagatatgatttacagataaagtacgaca

SEQ ID NO: 1648 - DNA, 140 bp, Zea mays
  misc_feature: Incyte ID No: 700159216H1
catcgcgtcgctggcgcgggccaactacccgccctacggcatcgacttcgccgccggccccaccggccgtttcagcaatggcctcaccaccgtcgacgctatatctcggcttctgggcttcgacgattacatccccgcgt

SEQ ID NO: 1649 - DNA, 260 bp, Zea mays
  misc_feature: Incyte ID No: 700159219H1
ggaattagttcgggaatataccaaggaaataaaatggcgtgatgaggattatgtccccaaaacattgaaagaacacctaaaagtttcactcataagcattggaggtacactggtgctgtgttccgcgtttgttggaatgggtgatgtagtaacaaagaagatcatggaatgggttatgagtgatgctgaacttgttaagtcttttggtatatttgtacggctctccaatgatattgtatcaaccaagcgtgaacaaagag

SEQ ID NO: 1650 - DNA, 260 bp, Zea mays
  misc_feature: Incyte ID No: 700159220H1
cctgaactggtggaagctaaacagagtgaagtttccaaccctctctagaatggcctgtgatatcttggccattccgatgtccatggtaagcagtggcagctccatattcactgctggaacaggaagccgcatgctcgatgactacagaagctctctccgacctgagacggtggaagcacttgtctgtgcaaaagactggctgcagtactctacgaaggctgaaggatcgtaggtttatcgtcgtcgctggtcactgctcc

SEQ ID NO: 1651 - DNA, 130 bp, Zea mays
  misc_feature: Incyte ID No: 700159221H1
acctgatcccaaggacaaaaagcctgagtcatgggatgacgatgacgatggtacatggaagcctagaatgatacctaatccagaatacaagggaccatggaagcggaagaaaattaagaatcctaactac

SEQ ID NO: 1652 - DNA, 258 bp, Zea mays
  misc_feature: Incyte ID No: 700159225H1
atccagcactaaaattgttagtagtgctgataatgccaagtgtgtggacataaaaccgatcaatggaagtgataagagcaatgacaccagtgataagagcaatgacaccgtcgatgctaatgtgaaatccaactctggaattgttgcaaacagtgatgctagtaacaccgatgtacagactaacactggaagtgtcaacaacagcgatgattacagcattgactcaaaaccaaacattggccgggttgctgcaacata

SEQ ID NO: 1653 - DNA, 132 bp, Zea mays
  misc_feature: Incyte ID No: 700159226H1
ctgctgtccttcctggcgaagatcaacctggacgtgacggacctggtggcgctgtcgggcgggcacacggtgggcatcgcgcactgcggctccttcgacaaccggctgttcccgacgcaggacccgacgctg

SEQ ID NO: 1654 - DNA, 133 bp, Zea mays
  misc_feature: Incyte ID No: 700159231H1
ctcaaatacatgtacaggcctgtaaaagaagatgtctctagatccattactttaatattcgtggaatcatagccagaagtataagctagtgaggggaattgtagatcaacgggaagatggtgatattctgata

SEQ ID NO: 1655 - DNA, 255 bp, Zea mays
  misc_feature: Incyte ID No: 700159233H1
aaatttgaatttccaaccccagatgaccgccctgggccaccaatcatcagcttcagtgatgcctcatttggttaccctggagggcctaccttgtttaaaaatttgaattttggtatcgacctggacagccgcatagcaatggttggtcctaatggcattggcaagtccactatactgaaactaatttctggggatctgcagccaacttctggaacagtatttcgctctcccaaggttcgcatggctgtattcaat

SEQ ID NO: 1656 - DNA, 255 bp, Zea mays
  misc_feature: Incyte ID No: 700159234H1
  unsure 196, 204, 208, 211, 217: a, t, c, g, or other
gaagattaaagcacaggagctaagggagcttggaactcacaagagggcaaagaagaagagagaggagatggcgggcgtcctcaggaagatgaggtcggctggtacgcacactgacaaaaagaaatagagagcatttcaagttcatggagctggctgccagagattatgttccagtgtctgattttccatacatgtngaacctantagncangtcaangtattatgtatcgaaccagctcatgggattttgctcct

SEQ ID NO: 1657 - DNA, 66 bp, Zea mays
  misc_feature: Incyte ID No: 700159236H1
attcataaggactctgattatggtgcgttcggaacttataataataagcacatgaaattttgcttc

SEQ ID NO: 1658 - DNA, 251 bp, Zea mays
  misc_feature: Incyte ID No: 700159237H1
  unsure 10, 28, 71, 109, 137, 153, 155, 158, 168, 173, 218, 232, 235: a, t, c, g, or other
cgacggtggncgacaccaacctcttcanccagttcgccaacgagtgcaggatacgcaacgcctaccaagcncgccatcacgctcggcctggtgctcgtcacggccaggnccaatcgccgccgacgacttcgtcatcnacgtccacctcatggncnggnacacagatcnatcgncggacgatgaggtggccaacgggatggtggcgtggaactcccgcnacgcactcagcagnacngcaacgtagtgacgag

SEQ ID NO: 1659 - DNA, 256 bp, Zea mays
  misc_feature: Incyte ID No: 700159242H1
  unsure 211-212, 231, 253, 255: a, t, c, g, or other
atgcagcatacctgaggattcatggagagacagtgcttgatgaggcaatttcttttactacgagatgccttcaagatagattagaacatttggaatcaccaatagcagaggaagtgtcgtctgcccttgataccccactttttagaagggttggaactttggaaatgaaggattacattcctatctacgaaaaggacgctaaacaaaaccnntcaatattagagtttgcgnaactggacttcaaccttctaangnt

SEQ ID NO: 1660 - DNA, 254 bp, Zea mays
  misc_feature: Incyte ID No: 700159243H1
aaactattgagtatatgataaactaatgctaggaagacctgaccatttgtgtgcttccaatcgttttcttagtagcacttggattatgaaaatatgtcttagcatgttgttgggttctaactttagcttccttagatgtcaggaatgtattgtttctgtgatgaaatttgtgaatacattcactttagtacatttttttatataaatatagtttcctttgttgctctgaagtttaatgctttcaattgaatgaa

SEQ ID NO: 1661 - DNA, 267 bp, Zea mays
  misc_feature: Incyte ID No: 700159245H1
  unsure 245-246, 248, 265: a, t, c, g, or other
agatgagataactcaggtcatgattcatgaactgatacatgcttatgatgactgttgttgccaaaaatctgaactggaacgaattgtgctcaccatgcttgctctgagattcgagccaattcaccttagtggtgattgccattacaaacgtgaaattgttgcgtggtttcatgaagataaagggtcatgagccctgaatgtgtcaaaaggcgggctctgaatgtctgtgaaaaaagcaaccccannantgctccagagggtgctnaa

SEQ ID NO: 1662 - DNA, 256 bp, Zea mays
  misc_feature: Incyte ID No: 700159247H1
  unsure 34, 39, 174, 198, 233, 240, 245-246, 251, 254-255: a, t, c, g, or other
gtcaattggcaattctatattttatcgtccgaangcaanacaagttcatgcagataatgcaaggttgaatttccacactggcaatgttggggaccatatagcactactaaatgtgtataattcttggaaagaaacagactattcaactcaatggtgttatgaaaactatatacnggtgcgcacatgaagagggcaagngatattcgggatcactagatgggcttatggaaagngttgagnttggnntttcncannc

SEQ ID NO: 1663 - DNA, 164 bp, Zea mays
  misc_feature: Incyte ID No: 700159253H1
  unsure 17, 104, 157, 162: a, t, c, g, or other
gcataggccgcatctcntctatcattgtcttaccactctaggtttctatggtctgaagacttgtgattttctccgcactgctgttgctattcccgtgtcgtaanaatacgagatgttttaagcggctgaacacacggtggtgtaatctgttactggnaaggngc

SEQ ID NO: 1664 - DNA, 266 bp, Zea mays
  misc_feature: Incyte ID No: 700159261H1
  unsure 198, 209, 246, 263: a, t, c, g, or other
gctagcattggcaacagacactgactttatttctggattgatagctttgcgctgcgctaaatatcaataaaagaagtgtggatagggaccttgatgtttaccgcaacatactctcaaagctggttcaagccaaggaacttctcaaggaatacgtggatagggaaaagaagaagagagaagaaagatcagaaaccccanagccaaatgangctgtcacaaaatttgatggaaatctttattccatanggcattagatcaccccntgg

SEQ ID NO: 1665 - DNA, 263 bp, Zea mays
  misc_feature: Incyte ID No: 700159263H1
  unsure 240: a, t, c, g, or other
gatgcaaagaaaataaaggaagaccttgcgaagatgggagtgatgatccgccactatgacaagaaggaactgaaaggctatattcgtatctcggttgggaaacccgagcacactgatgcactaatgaagggcctgaatgcacttcgattgtgagagcttttgcacacgatcaagcttttgcacactatcaagcttttgcacaccatcacatcaatgtaaacagtgtattcctttgcgganatatatccgtcaggctggatgca

SEQ ID NO: 1666 - DNA, 259 bp, Zea mays
  misc_feature: Incyte ID No: 700159268H1
gaggaagagagggagaggattttgggtgctggtggatttgttgttgccggacgggtcaatgcaagtctgaacttatctagggcaataggtgacatggaactgaagcaaaatgacctcctgccagtggagaggcagatcgtgacagctgaacctgaattgaaaacagtccagctctcggaggatgatgaattcattgttttagcttgtgatggaatttgggattgcatgtccagtcaagaagtagttgattttgtacata

SEQ ID NO: 1667 - DNA, 261 bp, Zea mays
  misc_feature: Incyte ID No: 700159269H1
  unsure 213, 223, 227, 231, 235, 239, 243, 248-249, 256: a, t, c, g, or other
gaataaagctttctatctgactgatctcggaagcgaacatggtacctggattaccgacaatgaaggtagacgttaccgcgtgccaccaaacttcccagttcgtttccatccctccgatgtcattgagtttggttccgataagaaggctatgttccgggtgaaggtgctgaacacgctcccgtatgaatctgcaagaagtgggaatcggcagcnacagcaagtncttnaggnagcngaantggngacannggctacnaccat

SEQ ID NO: 1668 - DNA, 260 bp, Zea mays
  misc_feature: Incyte ID No: 700159270H1
  unsure 10, 48, 58, 89, 204, 222, 235: a, t, c, g, or other
gttgcttgcngttgcaacggaccatccatctagtgcttgcattgctgncgcactcgcncagctatctccaccgctattggttgttgttnggttacccacgccttgctctctgataccagttgatagcagcagcagctagctataggttgtcagcaggatcgaccagatagatagcgcggatcggaattaacagcgctgcaggangatggtgaagagcacgangacgatgggggcngcgagctgcggcggcggcgtgctgc

SEQ ID NO: 1669 - DNA, 195 bp, Zea mays
  misc_feature: Incyte ID No: 700159271H1
  unsure 102, 135, 144, 167, 171, 191, 194: a, t, c, g, or other
ggaacctacgtgaggagcaactcaactggtacaattggcgagccattttctggcatcagccaatccatatgaatcgaacaatctaggtgcatatggcagcanttctatttatggtgactccacctggaggttcanctcatctgnggttgatatacctccttttggtncagntcggagatatgtggtccagntant

SEQ ID NO: 1670 - DNA, 263 bp, Zea mays
  misc_feature: Incyte ID No: 700159272H1
  unsure 227: a, t, c, g, or other
cttcactagtactcagccgccgcaatcagggacaggtagctcgagcgcgcgctccacctgctccgacgcgatgcgggccaagtggaagaagaagaggatgcggaggctcaagaggaagcgccggaaaatgaggcagagatctaagtaggcgcatcttgtgaccgaggatggcgagcttctcctgcaccatggctgagacgcgttgggatgattgtctccctttgtanacgtgctttgctgtagacgtaggcgatgtaaaccgt

SEQ ID NO: 1671 - DNA, 256 bp, Zea mays
  misc_feature: Incyte ID No: 700159280H1
  unsure 99, 135, 157, 170, 194, 198, 204, 214, 222-224, 233, 236, 245, 250-251: a, t, c, g, or other
gagctgtcggtggccgctcctacgatcgaggcgtccttggactcgaggttcctgagcgggctgaaggacgagcgggtggatgcctccaagatcttccanggtgactactactccaccggctcgccggtggacaangcgcactggtggaggacgtgangcaggccctgtangcgtccaaaattggagctacgcgnaggncgttgnacatcttcanggcaaaannnggtaaaagnggnggtccaacncggannagtgg

SEQ ID NO: 1672 - DNA, 255 bp, Zea mays
  misc_feature: Incyte ID No: 700159281H1
  unsure 125, 159, 172, 180, 192, 204, 206, 212, 222-223, 231, 238, 244-245: a, t, c, g, or other
cttcaatcaccaattgcccttccaaaggctgttaagaaccccacagaactggatggattgaggaaggcgcatattcgagatggtgccgctgttgtacagtaccttgcttggctggataatcagangcaggagaactatggagcttctgtttatttcagngagataaaagggncgcataanaatgacctttgnccaaccaatttncngaggtntctgtgaaannagaaggtngagggtnccggannaaaaaagttt

SEQ ID NO: 1673 - DNA, 254 bp, Zea mays
  misc_feature: Incyte ID No: 700159283H1
  unsure 209: a, t, c, g, or other
ccgacataattgacgaccatggttttgaggcatgggagggcttccccttcagtgctgagaagctggaaattcttgctgagaaggcaaagattaaagctgcatcacagaccttggagtccattctaatcagtggtcatttagactttgtcattggaaaagatggtgcaaaggttcctgtatcagaacttgttgggaagactgtccttgtntacttctcagcaaaatggtgcccaccatgccgtgccttcctgccc

SEQ ID NO: 1674 - DNA, 254 bp, Zea mays
  misc_feature: Incyte ID No: 700159284H1
  unsure 2, 191, 196, 200, 214, 224, 226, 231, 233-236, 239, 242-244, 250: a, t, c, g, or other
anagaatcttcaggagtctgttcgagttgttcacggggcctagaggttgcccatcacttttcctctatgtggatgtagtatgcccgtgtaaatgtatttgtgcatggcacctgtaaagttgtgtgttgaaattggtacacatcattaaggctatgtttgtttctctcctaaattatataagttggattatnatganaagntaggaaagtaaatnatcactttgnanccatnannnngtnaannnacacgnctgg

SEQ ID NO: 1675 - DNA, 187 bp, Zea mays
  misc_feature: Incyte ID No: 700159287H1
  unsure 117, 121, 133, 139-140, 156-157, 162, 166, 172, 175-176, 178-180,184-185: a, t, c, g, or other
gacaggcagggtgcatgctgctaggaggttatttgagtacttacaggccaatggcttgaacttccctgtaattcatcacataaatttccctgaaaccattgacagagatggtcttgncatnggggctggggcnaacgtnngtgctctcttaggctnncgtcntggnggggtntcnncnnnaaanngg

SEQ ID NO: 1676 - DNA, 253 bp, Zea mays
  misc_feature: Incyte ID No: 700159289H1
gtggtggcaggaagaggcctgtgcccaagggtattgtctatggcaagcccaagcaccagggtatcacccagctcaagttccagaggaacaagaggtctgtcgctgaggagagagctggacgtaagcttggtggactgagggttcttaactcctactgggtgaatgaggatagtacctacaagtacttcgagatcatccttgtggacgttgcccacaaagccatcaaaaccgacccgaggatcaactggctatg

SEQ ID NO: 1677 - DNA, 252 bp, Zea mays
  misc_feature: Incyte ID No: 700159293H1
  unsure 52: a, t, c, g, or other
ggcgcggcagtgcgggctcagggccatcgatatctggtccaggatgcagagnttccccggctgggagaagtcgttcctgagggacgggcttcacctgacgccgcgcgggaaccgggtgctgttcgaggaggtggtgttcgcgctcaaggacgccaacctcagcctggaggcgctgcccgccgacctgccgctcttcagcgacatcgacccggataatccggtcaagtcgttcgaggaccaggagtgaagaag

SEQ ID NO: 1678 - DNA, 266 bp, Zea mays
  misc_feature: Incyte ID No: 700159301H1
ccaaggcttggtgaggacaaggtgaaacaatgtgttgatccaagattgaatggagagtaccctccaaagggagtagcaaagctagcggcagtggcggctctctgtgtccaatacgaatctgagttcagaccaagcatgagcattgtagtcaaggcgttgtctcctcttcttgtgaatgcaccgtatcagccggctgctgctcctgatgtatcttcagatgcatgacagcatgagcaactgaaaacccatgtaaagaaacaccattt

SEQ ID NO: 1679 - DNA, 263 bp, Zea mays
  misc_feature: Incyte ID No: 700159302H1
aagagtgtggagaagaaggacccgaccggcgccaaggttaccaaggcagctgccaaaaagaaatgatgcaacctgtcgttaatcctgtatctgcttttgcaatacctgacttgtcactccatcccgaagttttgtatgcggttgttactgttattgtgtactgttaagctctgctgcggcgtgccctgttgtttgggtagcgtcaacgtcgagcgccacttgcgggtgtgcctttgtctgctatcagtagcggcaaaaattga

SEQ ID NO: 1680 - DNA, 262 bp, Zea mays
  misc_feature: Incyte ID No: 700159305H1
aaatcttttgtgcaggtgaagtggcaaagcttttttctgatgctggtgtcatatgcattgctagcttgatatctccatacaggagagatcgtgatgcatgccgtgctctacttccacattctaactttattgaagtatttattgatttgcccctaaaaatttgtgaagctcgtgatcctaaaggcctgtacaagcttgcacgtacaggaaagattaaaggtttcactggaattgatgatccatacgaaccaccaattaatgg

SEQ ID NO: 1681 - DNA, 261 bp, Zea mays
  misc_feature: Incyte ID No: 700159307H1
tcgagatcaaggagaaccaggcggcagagcattttcatgttcctctcttgcattcccctttctcgttcaccacttaccgtggaagctaagttttcaacttacgtgccattacctctgttgggatgttcgaagcaacttgtaaacttgacacttccgttgtgataataatctggttccatgtaagcaggctttatactttaataacaagtagtattatggaagtcaaatcttgtgatagtcttgctgatttgttcaaaaaaa

SEQ ID NO: 1682 - DNA, 261 bp, Zea mays
  misc_feature: Incyte ID No: 700159308H1
gttttcagggacattattccttctccccaccaataagccattgctgtaaatttgagagacatctgcgttgggactagaattcacattatcatgtctgatgtgattgatggacactgttgtttgcatccaatccaatgagatgaataatatatcctcccccacaacttggccaaatctttcagcttccattcttctgcgtatgcaggtatgttgcggcaaagaaaatcaacagtcaaaaggcctacagtactaccacttcag

SEQ ID NO: 1683 - DNA, 111 bp, Zea mays
  misc_feature: Incyte ID No: 700159309H1
  unsure 8, 15, 88, 95, 99, 103, 105, 110: a, t, c, g, or other
caataacntaacggnatttcaaattaaacttcctattttcccatagcatgaacagtgattagcctacttaaaatacagtaattatgancacaganagtnaatnanataana

SEQ ID NO: 1684 - DNA, 263 bp, Zea mays
  misc_feature: Incyte ID No: 700159310H1
  unsure 8, 24, 28, 48, 92, 240: a, t, c, g, or other
cttcagcnacaacgccgccacgcnggantacgcggtgttccgcccgancgccggcgtgtacgacccggcgacgcggctcaactacaccagcntgttcgacgcgcagatggacgccatccacacggcgatgaagaagctcgggtacggcggcgtgcagatcgccgtgggcgaggccgggtggcccaccaaggctgaggccgggcaggtcggcgtaggccccgaggaggccagggatttcancgccggcatgatccgggtgtgca

SEQ ID NO: 1685 - DNA, 263 bp, Zea mays
  misc_feature: Incyte ID No: 700159311H1
tgcaacaagaagcagccgccggagtgccagtgcaatgacgtgtcggtcaacgggtgccatccggagtgcatgaactgcgtcaaggtcggtgcaggaattcgtcccggcatgggccatggccccgtcgtcacctaccgctgtgacgacgttctcacaaacttctgccagagcagctgcccggaggcgccggcgccataggcgggtggccggtgtcttcttctgacgtacggcatgggacgccaagtcgagtttgcttctctcca

SEQ ID NO: 1686 - DNA, 259 bp, Zea mays
  misc_feature: Incyte ID No: 700159317H1
  unsure 144, 164, 208: a, t, c, g, or other
ctaaactcaatttgtattacaaggattcaactctttgggctattattaattcactgatcaagcagtgtccaaacaagttcaaatttcactcaagggctagaataaacataccaagtctacccaaaagttttcataatttttganactactaaactatgtctaanattataataggatctgtgtaatacccaatgtgtaaaataatganaagagatttgactttccttttatatttgatctcaatctattgtaacatggg

SEQ ID NO: 1687 - DNA, 258 bp, Zea mays
  misc_feature: Incyte ID No: 700159318H1
aatcagtactagagtatttgacgcagatccatcaaaggaaaaaaagaaaccaaaggagggtgacaacattgttcaggatgctcctgcagatattccttccctcctagaattgaagcgtatctactatgaactgatgattcgatattacttgcacaacaatgattacctggaaatctgtcgttgttacaaggctatttatgatatcccagcaataaaggaagatccaaccaagtggataccgattcttaggaagatctg

SEQ ID NO: 1688 - DNA, 255 bp, Zea mays
  misc_feature: Incyte ID No: 700159319H1
aaattgacgaaagagggccaagtatagcttagagagagaagctagctagctgaaatggaggctagcagccgccgccgcgtctctcttgtgccactgctggtggtgatcatcgggtgctgtgcctgccgcgcccagatcccgatcccggcgaggacggacgggttcgtgtacggcgggaagccgccggcgtggggcgagacggtggtggtagaggcgttcttggacccagtgtgccccgacagccgcgacgctggc

SEQ ID NO: 1689 - DNA, 255 bp, Zea mays
  misc_feature: Incyte ID No: 700159321H1
  unsure 20: a, t, c, g, or other
gcagttggcacccatttgancccacgcttgtgagctcatcctgggacggccgggtagtgaaatggaccagcgcacgtgatgaaggggcttctgatgtcgattgagttgagtcgaccgtgcaggtgcagcgcgagtgatctttactgttcgtggttgtgggctaaaaaaaaacatacccaatcttgcactaaaaaaaaggagagtaagcacagctcgtaataaagaaagaagatcatgtgttgcagtggtaatttg

SEQ ID NO: 1690 - DNA, 255 bp, Zea mays
  misc_feature: Incyte ID No: 700159322H1
  unsure 16, 68, 83, 86, 107, 135, 147, 161, 169, 187, 189, 199, 213, 219, 248: a, t, c, g, or other
gaacgcccggggcggnctccacaacgtgcgcttctgctagaaggaccttcagacggcgatcgaccgcnaggctgtgttcgcgnacncgacgacccgtgcagccccanctacccgctgattcagaagctccgctcngtgctggtcgancacgcgctggccancggcgacnccgagcgcgccgcggagncntccatcttcnccaaggtggccganttcgancagcaggtccgcgcggcgctgcccaaggnggtggaa

SEQ ID NO: 1691 - DNA, 254 bp, Zea mays
  misc_feature: Incyte ID No: 700159323H1
ctacagatttcgcagttttgctgggggtaactacggaatggggggcggatccggatctttcctcaaggtcttggtcaacaacatggatgtcctcgcggggcctttggtttcacttgcgtatcctctgtatgcctctgttagagcaattgaaacaaaatctgctgtggatgatcagcaatggctcacgtactgggtgctgtactcatttatcactctattcgagctcacctttgctccggtactcgaatggcttc

SEQ ID NO: 1692 - DNA, 255 bp, Zea mays
  misc_feature: Incyte ID No: 700159325H1
gttgaaatgaatcagtggaataaaatgtagatattttttctattaacatgtacatctaaaatgtcagtttagatatatctgacattactgcctattcgttcccagctaaaccattaagcaatggaacacttaaataccataactagctgcaatatgtctggcactgtttatagcataactacctattcgttctcatctagatcctccatcactagctgcaatatgattcaggatctgaataatttgggggtggaa

SEQ ID NO: 1693 - DNA, 123 bp, Zea mays
  misc_feature: Incyte ID No: 700159327H1
tgcaagtcgagattttattagtgatgcaagttgctggtattggtgcattatcgggctaatacgcttgcgttgccttctgattttataagtgatgtaaattgctggttttaacgattaaaaaaa

SEQ ID NO: 1694 - DNA, 257 bp, Zea mays
  misc_feature: Incyte ID No: 700159328H1
  unsure 51, 62: a, t, c, g, or other
gtcccccggcaaattcccaaccgccgcacggcaacaccagcggtcggatcnggggagaaacngaagggcaacagcagagcgcgaattccaccgacaaatccaagatttcgagcacagacacaggcgaaactcgatggcggaggggtccaagccggacgtgccgctgttccagctcctcagcgatcttctccagcaggtggagtcaatgagcaatcaggaagaagtagagctgcgcgctaagattgaagcattaggat

SEQ ID NO: 1695 - DNA, 258 bp, Zea mays
  misc_feature: Incyte ID No: 700159330H1
  unsure 4, 6, 24, 28, 71, 81, 89, 107, 133, 178, 207, 209, 221, 223, 248, 254: a, t, c, g, or other
atcnanaaggcagcagcacaagcnaganccacacctcctcccttcgcctgtgatcatgtcgtcttgctgcngcggcaagtncgggtgcngctccagctgctcctgcngcagcggatgcaacggctgcggtatntaccctgacgtggagaccgccgccaccagcagcgtcaagaccacngtcctcgccgcgccgaccaccaaggccancnccggcggcttcnangctgccaccgatggcggcggctgcnactgcnacac

SEQ ID NO: 1696 - DNA, 126 bp, Zea mays
  misc_feature: Incyte ID No: 700159331H1
  unsure 108, 119: a, t, c, g, or other
ctcacgacgacggaaacagtagtgctgccagtagagctctcagaactcgggaaaaaaatgtcagaggccgccgtgcgtgtgatcggcctatggcgagcccctttcgtnattcgcgtccntattggc

SEQ ID NO: 1697 - DNA, 125 bp, Zea mays
  misc_feature: Incyte ID No: 700159332H1
  unsure 6, 75: a, t, c, g, or other
cctgantcagtcatgtgaacatcatggaatgcttcagttttgtacaaactaaatttgttgtgctgtccgacagantctatgtctggtccttaaaaataaaggaataatgaatgtagtgtttttga

SEQ ID NO: 1698 - DNA, 253 bp, Zea mays
  misc_feature: Incyte ID No: 700159333H1
gctgcaaattgaacggcgtttctcgtctcacggcgtgctgcaaattgaacggggctacatcgcaacgcaacacacaaggtacaaaccggatctaaacattttcaatttacagcgaagttagcaagttactgaaatcaccatcaatcgttcaaaactcagcgcgccacaaacttctacgcctatactacgccatgcatatgcagttcatccactcaacgcatatcccgtaaggctataaagcacatgcgaaagg

SEQ ID NO: 1699 - DNA, 250 bp, Zea mays
  misc_feature: Incyte ID No: 700159335H1
  unsure 46: a, t, c, g, or other
tggatctccatggcacagaaatcacaaatgatgttcttcgacaggnggaggggtgggaagagttcgaccagcggcggaggcagaaacatcagaagcagctcgacttccgtgttggctcatctggtgtgttcgatgaaggcgcggatgatgataataggcgaaggtgactgcctgcctattgtgagcataatactttgctacgatatttctcccaaagaaccgtagaaatgtacaactgaaaactacttct

SEQ ID NO: 1700 - DNA, 249 bp, Zea mays
  misc_feature: Incyte ID No: 700159337H1
gttgctgaacgcctgaaccgcaagtcatccatgacctcttctattccgaagctgcttctcctcctcttctttctcagccatcgctctcccattgctcgcgcaggcgatgatggcagctacaaggttctgtccatgggctctccgagaactgactccgtctgttcccagtccaaagcggttccttcgtcgtccgccggtgccgccacggtgcccttgcatcaccgtcacggcccatgctcgccgttgccg

SEQ ID NO: 1701 - DNA, 250 bp, Zea mays
  misc_feature: Incyte ID No: 700159340H1
  unsure 36: a, t, c, g, or other
gcatagtcgatcatgaagggtggcaagaaggaagtngccggtgcggtggtggccatactgctggttctgcagctcatggcagctccaccgacggccatggccgcccgctcgccgcgcggagccgtgccggatggctccctcgccacgacgcccaaggtgacgatgctgtcggccacgctgtgctacacgggggagacatgcaaatacactccctgcttcactcctgcttgctcctgcagctttagtgatc

SEQ ID NO: 1702 - DNA, 250 bp, Zea mays
  misc_feature: Incyte ID No: 700159344H1
aggcagacaagttcttctacttcatgttcttcctaacctgctccttcctctacttttcactttttggtgcgatgctggttacctgcactccttccgcaatgcttgcgagtattgttgtctcattcagtctaaccggctggaacatcttcgccggattcctcgtaccccgaccggcgttgcctatctggtggcgatggttctactggtgcaacccagtgtcctggaccatctacggcgtcacggcgtcgca

SEQ ID NO: 1703 - DNA, 94 bp, Zea mays
  misc_feature: Incyte ID No: 700159346H1
  unsure 35, 91: a, t, c, g, or other
agctagcaacagaaaaatcatatgtattgtcaggnggcatggcctaaaaaaatggattttaatggtagaccctgattttggaactgctganaaa

SEQ ID NO: 1704 - DNA, 253 bp, Zea mays
  misc_feature: Incyte ID No: 700159347H1
atacgattcataggttctgccactacttgtgcgcggagagccaagaaatgcgtcaggggttgtgaagggaaggagtgccgatggccggtggccacccggcgccgctgcggccggtggtggttgcgatgaaaggccacccagggtctggcaagtccacgtcggcgcgcgccatcgcgaccgcgctttgctgtccgctcctggacaaggacgatgtgagggactgcatgttgcccctagagggcttggctgctgc

SEQ ID NO: 1705 - DNA, 256 bp, Zea mays
  misc_feature: Incyte ID No: 700159348H1
  unsure 160: a, t, c, g, or other
gtggggtccgggcgtcaccatagctggtggggtccgccagtcagtttgagttttggtgcgtgaagacagtgttggtagcccatcggcgcgtagagcgccatacaaatacaatctgccgtacagttaccttgcagttgtaaaatacctgcgtgaaaaaganaaaaaaaattctgagtccaggttatccctccacatgttcatgtactcggaccggaaaaaatgtaatcactttgaaacccgattgttctgatatatg

SEQ ID NO: 1706 - DNA, 250 bp, Zea mays
  misc_feature: Incyte ID No: 700159349H1
  unsure 105, 124, 139, 163, 178, 189, 196, 201, 220, 223, 225-226, 237, 240, 246: a, t, c, g, or other
tgttagtgtccactgtgaacagacatcgaccatccatttgcaccgaacagtcaatcagattaaaagtctaggagcaaaggcaggagttgttttgaatccagcgantccactcactgcaattgantaggttcttgatgtngttgacctggtgctgattatgtcngtgaatcctgggttnggtggccaganctttatngagantcaggtaaagaaaattgcngancnnagaaggttatntgnagaggngggg

SEQ ID NO: 1707 - DNA, 250 bp, Zea mays
  misc_feature: Incyte ID No: 700159350H1
caaggagtgtgacaatcgttgttgcatatctcatgaagaagcatcaaatgagcctcgaaagtgccttgtcactagttagaagtaaacgacctcaagtggctcctaatggggggtttatttcccagctggagaagtttcagaaatccttgcaagtggagcaggaatggagaatgcaacctgtgcagcactgataattatactagtgttataataggtgcagaaggcctcatatgttgtgaaggcgtatgcg

SEQ ID NO: 1708 - DNA, 247 bp, Zea mays
  misc_feature: Incyte ID No: 700159352H1
  unsure 34, 159, 192, 229: a, t, c, g, or other
gagaaactaaaacttgcatcgatcgctcgctcgncagttctttctgatcatcggtcgcctctctagctagtagctagctacctacctgatcggccatggctgaggagaagaagcaccaccacctgttccaccgccacaaggacggcggcgaggaggagncgagcgccggcggcgaggtggactacgacaagnaggagaagcaccacaagcacctggggcagctcggcgngctcggcgccatagccgc

SEQ ID NO: 1709 - DNA, 249 bp, Zea mays
  misc_feature: Incyte ID No: 700159353H1
  unsure 63, 209, 231: a, t, c, g, or other
gctgaggattattcaagcttcccctgcgccctaccctctgttgttaactttagtgacattgantcttttcttgatggttgcgatcaattgttcgaaaaccaaactttggatataatttctcctgttgagatacaccctagcatggacaccgttgcaacactagaagatcttttcctcaagacaaccagacaagcattggcaaatgttcntgatgggctaaatgcccatacnttgagagatcctggtcgg

SEQ ID NO: 1710 - DNA, 236 bp, Zea mays
  misc_feature: Incyte ID No: 700159354H1
  unsure 2, 20, 80-81, 104, 118, 133, 145, 150, 162, 186, 202, 217, 221, 226: a, t, c, g, or other
tnccatcctgtcgtgggatnccagccaccgccgctagaagaagagctcggcgattcccaggtcccgcgagaatatgccgnngcagatccatgagattaaggacntcctcctcaccgcnaggaggaaggatgcncgctcagtgaangtcangatgagtaaggntgttgtcaagttcaatgtgcgctngccaagtacttgtacngctcttcggcttcgntctntaganggcaaacgag

SEQ ID NO: 1711 - DNA, 198 bp, Zea mays
  misc_feature: Incyte ID No: 700159355H1
  unsure 9, 28, 30, 45, 51, 80, 94, 98, 106, 110-111, 115, 118, 128, 142, 147,176, 185, 190-192, 195: a, t, c, g, or other
ctcgaacgnagatgttggcggtgttcancnggcaggtggtggagntgccgncggactggtggcggcgggcagccggtacnccgtcgcccaagantaangcgtcgcngctnntggngcncttcctgggncgcctccgatccgnccgtntccgtgcagctctgcgaccacggccaccncgcctactnccacnnnaancag

SEQ ID NO: 1712 - DNA, 246 bp, Zea mays
  misc_feature: Incyte ID No: 700159356H1
  unsure 45, 57, 66, 78, 105, 109, 129, 135, 153, 164, 168, 175, 177, 203-204,206-207, 219, 225, 227, 235, 239: a, t, c, g, or other
gctgtttttattcgtttgtcacataagcagtggtggtcggtcggncggcgacaatgntcggccgtntgttcgtcctgnccgctgccttcggcgtgctgctcgccncagncgccgtgtcctcgatgcccntcctgnctccgctgggtactagcngccctgctgcnggcnacctgtncntgtacttccacgcggactcgtgcccnnanntggagacgatcntgcggntnagcgtggncgcnggcgtct

SEQ ID NO: 1713 - DNA, 246 bp, Zea mays
  misc_feature: Incyte ID No: 700159357H1
  unsure 110, 151, 206: a, t, c, g, or other
caccgccgaggaagcagcaagcagcaaggtcgacatgtcgtctccgccgccggtgaagctgatcggcttcttcggcagcccgtacgcgttccggcggaggcggcgctgtncctgaaagcgtgccgtacgagctgatcctggaggacctgtncggcagcaagagcgagctcctgctccaccacaaccccgtgcacaagaaggtgccngtgctcctccacggcgacggccgggccatctccgagtccc

SEQ ID NO: 1714 - DNA, 247 bp, Zea mays
  misc_feature: Incyte ID No: 700159361H1
gttgtatatgacaatcaattctttgcactccgaaaaaagtgttgcccatccgagcttgcatatattacttccttaagccgctgcaagaagtggaatgctcaaggtggaaagagcaaggcctattttgcaaagacaacagatgacaggttcatcataaagcaaatcaagaaaacagagttcgattcatttattaaatttgcacctgattactttaggcatgtttaccattctctggacactggaagcc

SEQ ID NO: 1715 - DNA, 247 bp, Zea mays
  misc_feature: Incyte ID No: 700159363H1
  unsure 118, 127: a, t, c, g, or other
gtaagacctgcccctgtaataaccgaggaagtgacagcttcccttgaagaaatgataaagaaaagaatcgcagagagtcattttgatgatgttgagaagccgtctctcttgccatctnaagctccanaggagcacaaggaactggatgaaactaagagcaagaagggtcttgctgaactgtatgaggatgactatgcacaaaaagcaggcattgcacctgccccactttctatttcagatgaactaa

SEQ ID NO: 1716 - DNA, 244 bp, Zea mays
  misc_feature: Incyte ID No: 700159365H1
  unsure 214: a, t, c, g, or other
cttatttcaacgagtcaccagttgaggttgttaaggaacaagataaagagtttaataaactggcaactgatgccataattccttctatgcctggacatgtggttcaagcttttacattgctgaaatcaagcacagaggctcagagtgttgtcgcctcccttgcatcagatagaaatgtctgggatgcagtattgaagaatgagaaggttatggnattttataagactcgccagacaactccagt

SEQ ID NO: 1717 - DNA, 242 bp, Zea mays
  misc_feature: Incyte ID No: 700159369H1
  unsure 153, 162, 197, 224-228, 233, 235, 237: a, t, c, g, or other
atacgttcgtaccatcaagtgtgttcttgtgtattcatttttagctttgatcataactctgtacaaaatatagtcgatcatcgaatcgaatacagcgcacagtaatgtatcacgcctattgctttggctgaatttacgtatactacgacgacnaagaagatnatgattagatgctaatctaatatacatcctgcagnacagtcgttttctggagttatcagaannnnnaaaananangaggg

SEQ ID NO: 1718 - DNA, 242 bp, Zea mays
  misc_feature: Incyte ID No: 700159372H1
  unsure 210: a, t, c, g, or other
attcaaatagcaagactgaagcaaagtgaagaaaaatcagagctgaaacaacagaatattgagttcatgaaggaagttgaactcaaaaagttggagtttcaatccaagaaaatagaaatgcagcaaactaaattgatgatggaagacaggatccgaaaggacgaagagctgaataaaatgtatgctatggatatggatgctttaccagangagttgagagctgtatacatcgcgaggagaaa

SEQ ID NO: 1719 - DNA, 240 bp, Zea mays
  misc_feature: Incyte ID No: 700159375H1
  unsure 40, 77, 92, 213, 218, 226, 233, 239: a, t, c, g, or other
tgcgttttagtacgcggtggtggactgtggtatggtttangcgggctgttatgaattcgctcgcaatcctgataggntctgaggtggttaantaatcgcggaacgctgataatctcgttttaaatctggcgcatgctgttgcaagatgttctatactagttgttattctggattgtgttatattgatttgggtttgagttgctaggtagaaanaaaanaatgtggngaggtgnaggagng

SEQ ID NO: 1720 - DNA, 240 bp, Zea mays
  misc_feature: Incyte ID No: 700159376H1
gccacctaaatcaaatactgcagatgagaatgcaaataaatatacgcagttcaagcagtttgatactgttcagaatttctctgaccattactacgctaagaattctcatggagagccaaacagagcctggtcaaagagagttcaacatgactggaaacttctggagaaggatctaccagcgtatatttttgttcgggttgctgaagatagaatggaccttcttagggctgcaattattgg

SEQ ID NO: 1721 - DNA, 201 bp, Zea mays
  misc_feature: Incyte ID No: 700159377H1
  unsure 107, 140, 153, 182, 185, 190-192, 195-196: a, t, c, g, or other
ccaggtgttaggctactgaccagcgtctaggaagtttaaacgtagattaagcatgcttaatcattcttttgtagattttgtgctgctgagagcaaggtcagtagtangtactaagtaataataacacaactcttgctgtngctgcacacctgnttttgacataagttgctttcctcctaagnaanagagnnngannaaaaa

SEQ ID NO: 1722 - DNA, 240 bp, Zea mays
  misc_feature: Incyte ID No: 700159379H1
  unsure 127, 195, 211, 214, 216, 228: a, t, c, g, or other
ccaggtctgtcctatctgccttgtgaaccccaaagacatggcgtttggctgtggacaccagacctgctgtgactgcggacagagtctcgagtcgtgtccaatctgtcgcactcccatcaccacaagnataaagctatactagcaagtggtggctttggatcattgccaatgggtggtatactggagccaccctgnctcacactggaggatngcnangcatgtcccagnaacctcgggaca

SEQ ID NO: 1723 - DNA, 237 bp, Zea mays
  misc_feature: Incyte ID No: 700159382H1
  unsure 80, 91, 98, 114, 200, 232: a, t, c, g, or other
gggtcctcgaaagtatacctcaagatataattgatacacacgagttacaaacaatcactctcgactacagaagggagtgncaacaggatgntatagtngattctcttacttgcntagaggaaggagaggagaaaagcatgaacggctctgcttctgcagcagcgcctcacaaagaagagcggcacagttcctgcattgcntgagatttgcagccaacggacacgatatcaancgtgg

SEQ ID NO: 1724 - DNA, 201 bp, Zea mays
  misc_feature: Incyte ID No: 700159383H1
ggtgaagtacgagggtgtcatcctcaacaaggcccaaaacacctcgtaatcattgatagtcatcaaacgacttgccctttagcactccagttcaagtataatctgtgtactatgaattctgtgtttgttggataccaaatgcactgccagttttgcgtctgtgcccataattccatcttgatcagactagcagttaggaac

SEQ ID NO: 1725 - DNA, 235 bp, Zea mays
  misc_feature: Incyte ID No: 700159385H1
  unsure 161, 210, 223, 233: a, t, c, g, or other
cacaatgttcacctggtcactgttcctgccgctaagactcttggcgagtgggccgggctttgcaagattgactctgagggcaaggcaaggaaggttgtaggctgctcctgcgtcgtcgtcaaggactacggtgaagaatctgagggccttaacatagtgcnggagtatgtcaagtcgcactagatgtgtgacatgtttcagtgatactcntggatttggactnggttaaaatnat

SEQ ID NO: 1726 - DNA, 239 bp, Zea mays
  misc_feature: Incyte ID No: 700159386H1
caataccttgaacaactaagcaagtccaatgtctcatgcccagccccttcgtttacaggcccagtggaaacacgtcgatattcaggataaccaagccaatgctatgaaggaaccaggaaccagtggtgggtatggctccccaatgaaagatgacaagaacaaggatgtggatacaatagcttcgaacttcatcaagcttaagcacagggcttgggcactccagaagagcacaaccatgt

SEQ ID NO: 1727 - DNA, 236 bp, Zea mays
  misc_feature: Incyte ID No: 700159390H1
  unsure 120, 131: a, t, c, g, or other
atttgaagttgatgttttgtatgtggacacatgcgactcgcaaattccacagaagataagcacttacacaattggacctttccaaccctccaaaggtgagagggccaaactgaaagttanagtgcgtctcnacatccacgggattgtcacagttgattcagctatgatgctggaggaggatgtggcagttccagtctcatctgctaatgaagctccaaaggatactacaaagatgg

SEQ ID NO: 1728 - DNA, 239 bp, Zea mays
  misc_feature: Incyte ID No: 700159391H1
  unsure 23, 96, 108, 114, 116, 171, 217: a, t, c, g, or other
ggaaaattttcagttctactgcnggagaaccatcagttggaaccatttctaggtcaaaaaagaaagatggcgttcaggcgacagtgcaatctcgancatccacttcanagagancnactcctttgcagactggaaacttaaaggcgaggggtccaaatccaccagcaccgncacctccaccacgtcggccatcacgaacgactaccaaaccaagtgncggtgcctcatcgattggcgga

SEQ ID NO: 1729 - DNA, 234 bp, Zea mays
  misc_feature: Incyte ID No: 700159394H1
  unsure 33, 39, 54, 62, 163, 180: a, t, c, g, or other
ccgccgcctgcaacctccccaactccaacgtcncgctcngcatcaccctgctgnacctgaanccgggctctgcggactacgccctcttcgccaacgcctccaagatcacgccgtcagccggcggcaaccctgcgagcgacaggccgcgggcagcggcgtcaanctccgggctggggtcancggcggcgtcgcgctcgccgtggtctccgcgatcgcctcgtcactcttctgatg

SEQ ID NO: 1730 - DNA, 237 bp, Zea mays
  misc_feature: Incyte ID No: 700159395H1
  unsure 93, 164: a, t, c, g, or other
gcccatcccggtcctctcccggcgtcttctccctccgcaccgcggctccggcgatggcgggcgtcggctccgcgctgcgtcggctctacctcnccgtctacaactgggtcgtcttcttcggatgggcgcaggtgctgtactacgcggtcctgacgctgcgtttnagcgggcacaaggccgtctacgccgccgtcgagagccgctgcaattcgcgcagacagccgccatcatggagat

SEQ ID NO: 1731 - DNA, 124 bp, Zea mays
  misc_feature: Incyte ID No: 700159396H1
  unsure 47, 53, 116-117, 120-121: a, t, c, g, or other
catttggctcggtgtgtggcagcaagagcagcacagcatctggaagntgcacncataacttgtgccgatatttatctatatttgtgcttggatagcttccaggctttgatgataannaannaaa

SEQ ID NO: 1732 - DNA, 266 bp, Zea mays
  misc_feature: Incyte ID No: 700159405H1
  unsure 28, 76, 89, 109, 218, 225, 245, 248: a, t, c, g, or other
tttagtgttgtggagcaggaactgtgcngacactgaggctgttacagacatggtcagctcgcagctacagctgcanccgttacgcaacnggtcgcgaatctagagtcgnaactgctcttacactgctgaagtcacatctctttaggtatcaaggccatgtcagtgctgcccttgttcttggtggagtggattgtactggaccgcatcttcacactggntatccanacggctccactgagaactcntcnttttgcccacgatgggtt

SEQ ID NO: 1733 - DNA, 265 bp, Zea mays
  misc_feature: Incyte ID No: 700159407H1
  unsure 125, 138, 264: a, t, c, g, or other
gttccggtcttcaatggattgttctacgcttcagaactgcagtgactatgttttgtgctattttggttgttttaatgccctaatcactgcaagtgttttggtgtttgatgatcaacataactatntatattaattgtntgctagtgtttaaaaatatagtttggacggtgcaacgtggatttcgatgaagacatcgtggtgatcaagaaaatcatcttaaagtagtacagtagaagatttattgaagacttatgtagatcatgna

SEQ ID NO: 1734 - DNA, 270 bp, Zea mays
  misc_feature: Incyte ID No: 700159411H1
  unsure 210: a, t, c, g, or other
agagaatgctttttcaaaaataggggaagcactagatcacttgaatagccgcggtactggctctggttcaagtatacttggcataagacggatacctcccgattcaggacagtcaaatgcatcttatcatgacgactgcacagcggcccctgcagcaaacagcagttcaaggttgccgaacggctgtgattcggaagctcaatttcccanagagttgatatcatcctgcgttgctatgatgcttatgataaagaactgcacggagaagca

SEQ ID NO: 1735 - DNA, 271 bp, Zea mays
  misc_feature: Incyte ID No: 700159413H1
  unsure 57, 103, 227, 250: a, t, c, g, or other
acaagttggggctggaccgttctaaagtaaatgtaaatggaggcgcgattgcccttngacaccctctgggtgcaacaggtgcccggtgtgtggctactcttcnaaatgaaatgaagcgccggggcagagactgcagatttggtgttgtcaccatgtgtatcggatctggaatgggggcagcagctgtgttcgagcggggagacgcggtggatggactctccaacgtnagggacatgcaggcacataattntctatctaaggatgcgaagta

SEQ ID NO: 1736 - DNA, 276 bp, Zea mays
  misc_feature: Incyte ID No: 700159416H1
  unsure 115, 130-152, 242, 246: a, t, c, g, or other
atgagcagaaggaagagaaggtctagcctttttgacatggtgcctgatgagtccatggaccttccaccccttcctggaagtcaagagccagagacctcagtgttaaatcaaccancactgcctccccctnnnnnnnnnnnnnnnnnnnnnnnatcgatggagtcagatacttctgctgttgcggagagttctgcagcttcagctcttatgcccgagagtttacagcctacctatccgatgantgtnccagcttatttctcaccgttcttgcaattc

SEQ ID NO: 1737 - DNA, 255 bp, Zea mays
  misc_feature: Incyte ID No: 700159420H1
  unsure 135: a, t, c, g, or other
cttcgatcggaatggcaccatgaacttcgaagagtttctggctcttaacaaattcctacagaaggtgcaaaatgtgttttccaccctggataggggtcgtggatttctaagtcttgaggaggtgtaccaggcatnaatcaaacttggtttctcgttggattcactagccttctatactgtttgtgagagctttgacaagagcaagaagggcatgattccaatggatgagttatatcactctgcatttttgttcag

SEQ ID NO: 1738 - DNA, 257 bp, Zea mays
  misc_feature: Incyte ID No: 700159421H1
  unsure 21, 54, 72-73, 80-81, 104, 116, 120, 144, 159, 181, 191, 220-221, 246,253-255: a, t, c, g, or other
gccgacgacgaccagcagacngttgactggaggcagaaatgcgcggtcaccganatcaagaaccagtgccanngtggttnntgctgggccttcgctggcggttncagccgtagaangcanccaccagatcactacgagcaactntgtagcgctatcggntcagcaggtgctggactgcganaccgacggtnacaacggctgcaacagcgctacatcgacnncgccttccaatacatcgtcgacaanggcggcnnngg

SEQ ID NO: 1739 - DNA, 257 bp, Zea mays
  misc_feature: Incyte ID No: 700159422H1
tggatcatcccctccttttggaatgtgctttcatatgccctcctcgtgatcatatgcatcctttggtcaccatctcgcaatccaacagggtttgcctattcagaggatgcaggtgagggagctgatgaggaagggctctctctagtaggcagtgcagtgaaaggaactggggatatggtaaacatgcatatctttccggaggataagcgtgcatgataaattttggtctgaattcagctgtactcctggcagaatgc

SEQ ID NO: 1740 - DNA, 258 bp, Zea mays
  misc_feature: Incyte ID No: 700159423H1
  unsure 12, 19, 93, 180, 194: a, t, c, g, or other
gcagccgacganccttgcnccgtcttcgtctgtcaagagtacagtttgacgcgagcagctggctgttccttctctcgtgcgcctttgctagcnttgggatcgatcaaagccggtgagcgagcgagcgagtgaggaccggaacatctgccagcatcatggcctccgagcatgcgcactgtnctgccaaggccgcngccggcagcaggttcgcggtgacgtacggcctgctgaggcagtacatgaaggagcaaggcggca

SEQ ID NO: 1741 - DNA, 257 bp, Zea mays
  misc_feature: Incyte ID No: 700159425H1
  unsure 232: a, t, c, g, or other
gggacgcgttcttccggcggctcattgacgaggagcggcggaggctggacgacggcgtcgagagcgagaacaaaagtatgatggctgtgctgctcactctgcagaagtcagaaccggagaattacagtgatgacatgatcatgtctctgtgcttctccatgttctctgcgggaacggaaaccactgcgaccacggcggaatgggcgatgtcgtgctcctgaacaaccccgangtcctgaagaaggcgcaggggaaat

SEQ ID NO: 1742 - DNA, 262 bp, Zea mays
  misc_feature: Incyte ID No: 700159428H1
acacggacggcagggcgtggggcgacgacgacgcggagggcagcggcaactgctacaaccagacgtcgccgatcagcgccgcctcgtcctaccgtggcggcacgagccaggagatgctgcgcgcgacggaggaggtgctggccacgtcgcgggtgcccgtcgggctggtcaacatcacgcggctgtccgagtaccgccgggacgcgcacacgcagacctacaagaagcagtgggtggagccgacggccgagcagcgcgccga

SEQ ID NO: 1743 - DNA, 263 bp, Zea mays
  misc_feature: Incyte ID No: 700159430H1
gggagtgaatgccatttgcttttatgccagtgaaatatttgtttcagctggtttctcatcaggaaatacaggaatgctggctatggttgctgttcagattccgatgacaggactaggagtacttctgatggacaaagctggacggaggccacttttgatggtatctgcagctggaacatgcctgggttgcctactagttggattgtcattcttagctaaggaacatcactggggaaaggacctgaacttagtgctggctttgg

SEQ ID NO: 1744 - DNA, 225 bp, Zea mays
  misc_feature: Incyte ID No: 700159434H1
  unsure 27, 42, 154, 170, 172, 187, 190-191, 212, 215: a, t, c, g, or other
agcacagctagcgcctgctccccttcncctgtgatcatgtcntgcagcagcggcaagtgcgactgtggctccagctgctcctgcggcagctcatgcaactgcatgtcccctaacgtggagaccgccgccgccaacagcatcaagaccacggtcntcgccgcgccgaccancnatgccagcgccaggnggnntcgaggcggccaccgaaggcngcngctgcgactg

SEQ ID NO: 1745 - DNA, 251 bp, Zea mays
  misc_feature: Incyte ID No: 700159435H1
gtgcgcttcggcttcaggctgtgagaaaaaaagaagaagaaaaaagaaaacctcagcctgagggaacgatgcctctgattctgtcgattgtttgcattctttttctgctggccatatctccagtggctctttcgatttccaacaccacaagctgtaagtaacgtgttcttcttgtgttctggagaaaatgtgtatagtgcaaccttgtgcgttgtctgttttttattcccgatcccgttagacatgggaga

SEQ ID NO: 1746 - DNA, 251 bp, Zea mays
  misc_feature: Incyte ID No: 700159436H1
  unsure 19: a, t, c, g, or other
gccgcgtaaggcaggcggncgtaggcctcagctcggctcagctgccgcctcgctcgaaccagaggagccaagcagaggaagcgaggcggagatgtcggcggggctggtgaccgacgaggccaccgtggggcggctgtaccggatccggcgcacggtgatgcagatgctgcgtgaccgtggctacctggtggtggaccacgagctcgccaccagccgccgcgacttcctccgcaagttcggcgagtccttcc

SEQ ID NO: 1747 - DNA, 251 bp, Zea mays
  misc_feature: Incyte ID No: 700159440H1
  unsure 2, 14, 76, 101, 128, 132, 137, 144, 184, 200, 217, 239: a, t, c, g, or other
anccctcctcccantccacggagaagcgaaaccgacctttccccctcccccgcattccacctcgcggagatccagnccagccctagggtttcgccagcggnagccaaactccacgagcgggggaagangggnaagcngggacgncgatggggcagccatggggcagcagtcgctgatctacgcnttcgtggcccgtggcncgtcatactggccgagntacacggattcaccggcaactncaccaccatcgc

SEQ ID NO: 1748 - DNA, 252 bp, Zea mays
  misc_feature: Incyte ID No: 700159441H1
  unsure 251: a, t, c, g, or other
gccggagatgttaggggggtggcaaaacttggtaccaaatgtggagcttgagcagagttggaacatgtcatggcaagggccgtagcaactgcgctcccacaacatgatatgcatgcaatgcacaaaatgtcgatatggatgcaatccgcaagatggatgtaatcacagttcggggagaatgagcaagtaagtaaccttggtttcctttttgctgctgtaactcgactcttttggttcatgtatcccaagant

SEQ ID NO: 1749 - DNA, 253 bp, Zea mays
  misc_feature: Incyte ID No: 700159442H1
  unsure 53, 101, 135, 171, 188, 218: a, t, c, g, or other
ctcttggtacgctacggtaggtggtcaaggaatccaaatggaggccctctagnatctcttggatataagcaaggttacagagttgatgtggatattcctgnccaaacatgggtagaggcatgtagcttccatgangttcttattttcaacactgggcattggtggtgggcnccctcaaaatttgatcnaatacggtcaccaatgctgttctttgaganggggaggccaattgtacctcctttactgccaccgg

SEQ ID NO: 1750 - DNA, 254 bp, Zea mays
  misc_feature: Incyte ID No: 700159443H1
  unsure 217: a, t, c, g, or other
acaacaccaccatgtcgtctgtccaggaggagcttaataacacacaggacatgctccaaggttacgtggagctctacaattacagtctctcctacgtgaagaccatggcgatcgggtgcgcgatccagctaggcatccctagcgccatccaccgccttggtggggcagcaacaatctcggacatcgtcaccgagaccggcgtcgacccgtcgaagcncccgtatctccgacggctcatgcgcgtgcttaccgtc

SEQ ID NO: 1751 - DNA, 256 bp, Zea mays
  misc_feature: Incyte ID No: 700159445H1
agaatatgacctgggaggagaaggggacctgttcaaagctccagaagccatcatcgaggaaccgctgctcctgaactgtctgtctgattctgttcatttgttgttgtgtaggctgggcttgtgccaagcttgaatcctcttgtgaaggagtttctcaatgctgctgatgacaagcggaaggaagtcctctctaaaatagaagaggatgttgctaagctcagcggttctgcagccaactaagaagctacaagtgaat

SEQ ID NO: 1752 - DNA, 258 bp, Zea mays
  misc_feature: Incyte ID No: 700159446H1
accaatgaaggtggttgatatgtttggatgcggattgcctgtttgtgctgcttcattctcctgcattgaggagcttgtaaaagtaaacaaaaatggtcttcttttctcaacatcttcggagcttgctgatgaacttatgatgctctttaaggggtttccagaagaatgcaatgccttgaaatccctcaaagaaggtgccatgaagtcagcatcatcttcgaaatggtcaacagaatgggaaaccaatgcactaccttt

SEQ ID NO: 1753 - DNA, 258 bp, Zea mays
  misc_feature: Incyte ID No: 700159447H1
  unsure 11: a, t, c, g, or other
cgcccgtggcnttggccgcggcgaacagagccgtagctatatatgctagggcaccacaccggacactgcaccaggcgatctccaaacagttgttatcatatctacttgtgtgcacaggcttcggctagacgaatagtttctcttagatcttgctattttgcttggaacttaacatttcataacttcctaaagtttaaacataaggttaattatattgaactcatagcgtgagagatagaaattggttatatagatctc

SEQ ID NO: 1754 - DNA, 262 bp, Zea mays
  misc_feature: Incyte ID No: 700159448H1
  unsure 56, 67, 73, 96, 171, 201, 213: a, t, c, g, or other
gtgagtgacaaacttgaaggcttccgtgcaacaaaagagaactttaaaggtttganttttcctacantttcanctgtgggaccaaatgcagcagtnattcactataaacctgaagcaagcacatgttcggaaatggatgctgataaaatatatctttgtgactctggggcncagtacctggatggtacaacagacattacnagaactgtacantttggtaaaccctcagcacatgagaagtcatgctacacagcagttttga

SEQ ID NO: 1755 - DNA, 49 bp, Zea mays
  misc_feature: Incyte ID No: 700159449H1
attatggtgtatacagccttttgggcgagctaatgttccttatatatta

SEQ ID NO: 1756 - DNA, 238 bp, Zea mays
  misc_feature: Incyte ID No: 700159450H1
gttgcgcaaacctgctgctgcttgatagatgtgtttagtgtggcttgcggtgattactctgcctgtgtggctgaataacaccacagtcgcctatggtgagatgtactgggccacgtgctgcctgagagagatcatttccatcgcttgcgtagagacaatggccgttttttaggatttgtaggattgccgtattgttctgttcgatttatatctaaccctgcccagaatcctatttttg

SEQ ID NO: 1757 - DNA, 235 bp, Zea mays
  misc_feature: Incyte ID No: 700159452H1
  unsure 39: a, t, c, g, or other
tgatttgcggcatgaactttcctgggaggcagcaacagnaagatttattagggttgctgatattgcaccaactgtgcctgtgggacaaccaccaccctcctcacagcatttcatgcgcatctccccagatgaactgcagaagaacatggaagaggcatcggcatttttccataatacaatctctgggtttgaagctgtgcgttgtgtgttcggtgcaataccaaacacactgcag

SEQ ID NO: 1758 - DNA, 152 bp, Zea mays
  misc_feature: Incyte ID No: 700159453H1
gggatatggtgatatatatgtattactcaaagaaaaatgtcaacaaccatcctatagttgttgttctcgggcattgtagtaaaatacatatcttgccatatgttgcattgtgctatgtttccttcagctaaaataaagaaaattttctcttt

SEQ ID NO: 1759 - DNA, 233 bp, Zea mays
  misc_feature: Incyte ID No: 700159454H1
  unsure 53: a, t, c, g, or other
ctcccaatctttcttgctgctccaattcgctctctttactcggccagcggaangggagaggagggcgagatgacggtggagaaggtggacgcggggctttccgacttcgacgcccacttcgatcgcctcttcgcttccccggacgccgcctccgacggcaaggtgaagctgctgctcttcctggccgaccgcaagcctggctcctccctctcctggtgccccgactgcaacgt

SEQ ID NO: 1760 - DNA, 112 bp, Zea mays
  misc_feature: Incyte ID No: 700159455H1
caagatgacggcgcaggctgcggaggagctcgccgcccagatcgagcagcagaagctcgaggagcagaagaccgaggcagaagaggttgtggtggaggaggatgacgaggat

SEQ ID NO: 1761 - DNA, 229 bp, Zea mays
  misc_feature: Incyte ID No: 700159457H1
  unsure 51: a, t, c, g, or other
ggtgcctccaaactgcatgatttcttggtttgggcaagggccagggcagancagacccgaactgcatgatttttggtttaggcaagggtcagggatgaacagatcctgatggcctgacccttttcttttttggtcgaggtttcacccctgtaacagactgagttctagtagctcagatcctgtttgcaggggtgctggtctggtggtcttgttttgtttttgtttgttg

SEQ ID NO: 1762 - DNA, 232 bp, Zea mays
  misc_feature: Incyte ID No: 700159458H1
agcgcgcttgctcgttgagcgtgaagaacgccgaggccaccttccctggtgtacagaaggatagcattccatatatctgcatggacctcgtttatcagtacacattactcgtggaaggattcggcgtcgatccggaccacgagatgaccttggtaaagaaggtcccttacagcgacgcctacgtcgaagccgcatggccgcttggcagtgccatcgaggttgcatcttcgta

SEQ ID NO: 1763 - DNA, 233 bp, Zea mays
  misc_feature: Incyte ID No: 700159461H1
ctcgtcgaccttggctccctttgtgagcctggcgctccatcctatcgctgtctctccgcacaccatgggcatctgcgcgtggttccggcaggagcagcgtgaaccgtccccgtatggcctggcttttcaacaaacattcccaacgatctgggaacacgctgacgacgtaaacgccttactgaacaaaggcatggtcgcggacagccgcttcctgatgccaattatgctcaggg

SEQ ID NO: 1764 - DNA, 233 bp, Zea mays
  misc_feature: Incyte ID No: 700159462H1
  unsure 163, 166, 170-171, 173: a, t, c, g, or other
ctctctccatccttgtgaatgactgtcctggtgtcctcaacattgtaacaggagtctttgctcgcaggggctacaatatacagagccttgctgttggcccagctgagaaggaaggcatttcgcggattacaacagttgttcctggtactgttgaatccattgngangttnntncagcagctttacaagcttattgatgtgcacgaattcatgacattacccactcaccttttg

SEQ ID NO: 1765 - DNA, 235 bp, Zea mays
  misc_feature: Incyte ID No: 700159464H1
  unsure 43, 45, 48, 54, 105, 187, 197-198, 205, 207-209, 212, 214-215, 220, 227,233: a, t, c, g, or other
ggagcatcataatagggggaagacaaggcaagctgtctgcttntntgnctatgnttggtatctcaagtcctgcggactgtttctgttggcacaagagggaataantgtgttcacggacctgtaatgcttgctccttgtcatatgaccttgctctaaacatttgtgatgaagctgtcaaggtaatatnttttctctannaaaaagnannngananngaagnggaaagnggggangg

SEQ ID NO: 1766 - DNA, 142 bp, Zea mays
  misc_feature: Incyte ID No: 700159465H1
aagacgagttagactttgtcaaaaccctcttcactagtggaggtatcgactatcactcgtcactgtaacccgatggtgatcggcaaccatgagcttccatgttattgtgttctgatacttgagacgtttattatgattatgt

SEQ ID NO: 1767 - DNA, 95 bp, Zea mays
  misc_feature: Incyte ID No: 700159466H1
  unsure 10, 33, 36, 44, 50, 56, 60: a, t, c, g, or other
ggtcgagcanactatcgatgaaaatactgagtnttnaattctancatatngttgtntgtntaaggctccaaataaagcatggtaccaccatagta

SEQ ID NO: 1768 - DNA, 162 bp, Zea mays
  misc_feature: Incyte ID No: 700159467H1
agatgggtggcggcatggaggtgcacaaaaaccggtggatcgaagagtggaacgccggccgggagaacctcgagttcaacttccgctggacccgccgcagcctcgccgtcgtcggcctcttcggcctcgctgtccccatcctcgtctacaagggcatcgtcc

SEQ ID NO: 1769 - DNA, 227 bp, Zea mays
  misc_feature: Incyte ID No: 700159468H1
  unsure 12, 54, 59, 83, 117, 125, 148, 152, 156-157, 159, 175-177, 179-180, 187,198-201, 204, 206, 209, 213, 219, 226: a, t, c, g, or other
ccgtgcgtgccnacgacgtcgacgccatagcgcgcgtcgctagtgacggcggcnggtgngacggcgagaccgtggtgtatgcncaccgcacgcgggagctagtgcgacttccgcggngcgtcgcnctgcccgtgacgctaggcccganccantatnngntgttccatgtgtgccnnntnnggcagtnttccgggtttnnnnttnangcncgtnggttgntggaaant

SEQ ID NO: 1770 - DNA, 107 bp, Zea mays
  misc_feature: Incyte ID No: 700159469H1
  unsure 56, 103: a, t, c, g, or other
gtggaggatcatctcatccgtcattccattctacacacagtcagacatgggcaacngcccctctctctcgccgtgcctgaacccgcacctgccggagtcgtcngcga

SEQ ID NO: 1771 - DNA, 227 bp, Zea mays
  misc_feature: Incyte ID No: 700159470H1
cttagtggcagtttctcgagttgatgactattggcatcattggcaagacgtatgtactggcggattacttgggttcacggttgcttccatttgctacctgcagttttttccactaccatctgatgaaaatggactgtggccgcacgcatatttccgacacattcttgagccagagggtgacagccaagcgcaacccacgtacatgagccgtcgcagctcggttcaga

SEQ ID NO: 1772 - DNA, 227 bp, Zea mays
  misc_feature: Incyte ID No: 700159473H1
  unsure 15, 40, 56, 215: a, t, c, g, or other
caccattcccaccanacttcaaggaagtagtgaagacganattcaagcgcttgttncgtgtttatgcccacatataccactcgcatttccagaagattgttagccttaaagaggaggcccatctcaatacctgtttcaagcacttcattctgtttacaaatgagtttggcctgattgacaagaaggagctggctccactccaggagctcattgantccatcatcgtt

SEQ ID NO: 1773 - DNA, 229 bp, Zea mays
  misc_feature: Incyte ID No: 700159476H1
gcgcaaggagttccgcaagatggccaaggctgtgaaaaaccaggttagtgacaactactacaggcctgatctgaccaagccagctcttgctaggctaagctcggtgtaccgcagcctccaggttgccaagtccggtgtcaagaagaagaacaggcagtcctaagcgctaagtttgtgttctgtcagggggcatgttggtgctcgtagtcccagcttatatttatctatg

SEQ ID NO: 1774 - DNA, 229 bp, Zea mays
  misc_feature: Incyte ID No: 700159478H1
gtatctgcatcaatggttcaatgttttagtagctccgattattcgaaatttctcagagaacaagaaatattcttaatgaatggactgaagactgtcaacataactggaaatggctatctagagcagagattgcagcctggattgagtggtttacagtctatgggttattcatctcagatacctattcaacctggtggtaccactgcaaacctgatgcataatcatgtca

SEQ ID NO: 1775 - DNA, 225 bp, Zea mays
  misc_feature: Incyte ID No: 700159482H1
ccttctgatgcgccccactacgtcggtcgccacctacttcagcctggaagagtggttcaaggacgcgggcgccaccgccacgctcttcgaggtggcgcacggcatgtccccgtggagcttgacgaagaacgacgcgctgtacaacaagaccttgaacgacgggtgcgcggcggacagcaacttcgccatggacacgctcctgagagagccccgggccgcgggtat

SEQ ID NO: 1776 - DNA, 223 bp, Zea mays
  misc_feature: Incyte ID No: 700159483H1
  unsure 160, 164, 176, 184, 187, 191, 193, 195, 200, 207-208, 211, 215, 218: a, t, c, g, or other
gcaacccgcaaagctgcttcccggactagctagggtttcgtctacgccgcttgatctagtcctctctcccggcacgcgagggcgcacgttgatggcggcggcaccggcggacgctaaggcggaggccgccaagatggacctcctcgaggacgatgacganttcnaagagttcgaantcgaccanaantggntnancaagnagaaagnnaanaaancgntccag

SEQ ID NO: 1777 - DNA, 221 bp, Zea mays
  misc_feature: Incyte ID No: 700159486H1
gcgtggagtactatgaccagaagtatggttcttctgggccaaaggtggacaaatacacaagccaatacctggcccattcgcataaagattaaaggtcgccatgttggttcctgcatgccggattaattttgggctcatctcgggttgctcatgacccgcccatggatgctggatgtttattctttttttttgtcttcataattacaaaatggtggtgtact

SEQ ID NO: 1778 - DNA, 223 bp, Zea mays
  misc_feature: Incyte ID No: 700159492H1
  unsure 2, 11, 25, 56, 61, 82, 109, 119, 122, 125, 129, 132, 166, 169, 187-188,201, 203, 220-221: a, t, c, g, or other
cncggatcganttaggctctccgantctccggttccctcctctcggcggcggcgcnggtcnctctccagctccggcgtggcncgtggcgtctgacctcaacaagcaagnaagcaaatgncangcngcanggntgcgcaggccaccctcaagggcccgagtgtggtnaangagatcttcattggactnnccctgggtctgancncgggaggcatgtggaanntt

SEQ ID NO: 1779 - DNA, 227 bp, Zea mays
  misc_feature: Incyte ID No: 700159495H1
  unsure 5, 11, 35, 37, 43, 76, 89, 101, 107, 109, 111, 147, 157, 159, 163, 165,182, 192, 198, 200, 208, 212, 218, 222: a, t, c, g, or other
caagnctatcnacaccggcgccgcgaagaaggcancntctagnagctccaagagccggactccagttccccgtcgncaggattgccagnttcctcaaggcntgcaantncncggacgcgtcggcgccggcgcccccgtgtacctcgncggcgtcctngngtantngcggctgaggttctcgnacttgccggnactccncnagggtacnacangaaganccgnattgt

SEQ ID NO: 1780 - DNA, 227 bp, Zea mays
  misc_feature: Incyte ID No: 700159496H1
  unsure 8, 18, 42, 49, 54, 65, 72, 80, 89, 98, 108, 133, 150, 155, 160, 168,171-172, 175, 208, 225: a, t, c, g, or other
aattcatncctatctcgntctccttcttcctggtgctcagcncggtggnctggntcgcgtacggngcgctgnagaaggangtgttcgtngcgttcccnaacgtgctgngcttcgtcttcggcctcgcgcaganggcgctgtacatggcgnacagnaagcncgcggagncgnnggngaaaataccggaacagatccaaggaaaagtgancgagggcaggaccaacnac

SEQ ID NO: 1781 - DNA, 280 bp, Zea mays
  misc_feature: Incyte ID No: 700159501H1
  unsure 3, 85, 99, 105, 176, 202, 227, 271: a, t, c, g, or other
ctncacatcatgaagagtttcaagtctgaatttaaactctcatgagtgcaaggtcagcagcaaattaaactagtggcacctgtgnaacttattctgtcntcttcnctgccagcagccatgtggagatccatatccataattttatcagtttgatatttgtgtgctgtgaaatactngtaaccacttcttagaacatactacntccgttctcgaaaattttggccgcngttcattttggacctaaaacgcgacaattaaaaaaaacgcgggngtacttttt

SEQ ID NO: 1782 - DNA, 101 bp, Zea mays
  misc_feature: Incyte ID No: 700159504H1
gttctatgtgaaaccagagttttgtagctatggatctcaatcgttccattaccatgtgttatgcacacttctgaatttgatatcatccaagtgaccggttg

SEQ ID NO: 1783 - DNA, 157 bp, Zea mays
  misc_feature: Incyte ID No: 700159505H1
  unsure 47, 81-82, 87, 98, 103, 107, 111, 133, 139: a, t, c, g, or other
caactagaaatcatcggacactattaaagtgtggtgttttgttccangtgcagttcctgcacctcaatcgcctattattgnntgctntaggtccttcnagtcntgtnaganacctaatcagtaccttgtgccntataanattacatcttccgattca

SEQ ID NO: 1784 - DNA, 278 bp, Zea mays
  misc_feature: Incyte ID No: 700159507H1
  unsure 121, 125, 129, 137, 145, 154, 157, 165: a, t, c, g, or other
gaaagatctaaagaaagagcttcagaaagttgttgaatggcccatcaagcatgctgctgcattttctagacttggaataccaccagtccggggggtgctgttgcatggcccaccagggggntccnagangaagcctntcaaggcngcagcgcangcngccaagcnccttcttttcttgagtggtgcagatttatattccaagtatgttggagaaggggaagctctgttgcgtagaacatttcagaaagctcgtcttgcttctcccagcattatatttt

SEQ ID NO: 1785 - DNA, 282 bp, Zea mays
  misc_feature: Incyte ID No: 700159513H1
ggcaaactggcgaacaaaaggctatgagaaagccaagatccacctccagtgtgatcatggacgaaaaatgactcacataaaatttgccagctttggcacaccacagggctcctgcgggagctactctgaaggcagttgccatgcacacaagtcatacgacatattttggaagagctgcattggtcaagagcgctgtggggtaagcgtggttccagatgcatttggtggagatccatgccctgggactatgaaaagagccgttgttgaggctatatgcggctg

SEQ ID NO: 1786 - DNA, 281 bp, Zea mays
  misc_feature: Incyte ID No: 700159514H1
  unsure 185, 235: a, t, c, g, or other
cttcaactattgtagaaaattggaaatcctcatattgaggggctaagatgtgcacacattatcacaaacataaagatccatagttcgcttaaaacatttctaaacttttgggagagatcttcaactattgtttctgacacttgaaaggatggcttggaccctcttattatcctgggagcctgggnggtttggaagcatagaaacagagtggtttggaagcatagaaacagagtgntgttccgtagagtttcttccaacctcactcctaatcctggggccgc

SEQ ID NO: 1787 - DNA, 283 bp, Zea mays
  misc_feature: Incyte ID No: 700159515H1
ggcagaggagatgaagacgttcgacccgtggccggtcttcttccgccgggagtggaagcgcaactggcccttcctcacgggtttcgccatcaccggattcatcatcacgaagatgacggccaacttcaccgaggaggatctcaagaactccaagttcgtccaggaacacaagaagaagcactgacgaaccaggtgaaggagttgtcagaaacgcatgtttggccagccagttctgttatgcttttgaatgaaaaatttagacccttctttctcgtttccttaa

SEQ ID NO: 1788 - DNA, 280 bp, Zea mays
  misc_feature: Incyte ID No: 700159517H1
  unsure 67, 200, 224-225, 234, 254, 263: a, t, c, g, or other
atgcaatacgacgggagtgcagtgtcgcctgaaatccagtttagtggttcatcccttcagagtcagncttcaagagggtccaacatgctagcattgggccctccgcagcaacatcaaagtttcgaattcccagcgctcggccagcccgttcagccaacaggcctgaaccctttcgaagagtggccgcagcagaaggaganccgttgccggcggtgttggacggnnacctgattnaggagattccggtgaagganccacgagancctggggaacgagtttt

SEQ ID NO: 1789 - DNA, 271 bp, Zea mays
  misc_feature: Incyte ID No: 700159518H1
gtttccggtgtacgactccaacgacgacgagatggcctccccgctccgtcggagcttcccctccctcggccgcgcgcttctcacgccggcgccggcgcggatgctctccgcggaggcctccgatgccctcgttgagatcaagcccagggagattgggatggtctccggcatccccgaggagcacctccgccgtaagttgtaatttattcaccagctaggactgcatctcagcaagttcaggcaaagttgggaggtggaaaattaatttttg

SEQ ID NO: 1790 - DNA, 272 bp, Zea mays
  misc_feature: Incyte ID No: 700159519H1
  unsure 74, 86, 97-98, 104, 125: a, t, c, g, or other
aacacacaggacatgctccaaggttacgtggagctctacaattacagtctctcctacgtgaagaccatggcgancgggtggcggtncagccaggganncccagngggatccaccgccgaggtggngcagcaacaatctcggacatcatcaccgagaccggcgtcgacccgtcgaagctcccgtatctccgacggctcatgcgcgtgcttaccgtctccagcatcttggccaccacaggcacagacgagactgagactgagagcgacgacagt

SEQ ID NO: 1791 - DNA, 176 bp, Zea mays
  misc_feature: Incyte ID No: 700159522H1
  unsure 102, 107-108, 112, 115, 118, 125, 131-132, 138, 140, 142, 146, 148-151,153-154, 166, 173: a, t, c, g, or other
cagatcttgtgaccctccctcagccgcgtcgcgtgcgcatcctacgatccaaagctctctctgctcgcagccatggcgaagaactacccgaccgtgagcgcngagtnnatgnggnggnggggggngtgggnnaagggnangngtgngnnnngnntaaaaaaacccnccaaaantgc

SEQ ID NO: 1792 - DNA, 273 bp, Zea mays
  misc_feature: Incyte ID No: 700159525H1
  unsure 122-123, 125, 128: a, t, c, g, or other
ccactctcccagcctctcttactctccgccgtcgccctgctcgcccgaagcagctgccggcaaaatggccccgaagagaggcggtagggcgccggtccccgccaagaagaaggcggtggtgnngnaancgctcttcgagaagaggccgaagcagtttgggatcggcggcgcccttccgcccaagaaggacctccaccgcttcgtcaagtggcccaaggtcgtgcgcatccagcgccacgccgcatcctcaagcagcgcctcaaggtgcccccg

SEQ ID NO: 1793 - DNA, 276 bp, Zea mays
  misc_feature: Incyte ID No: 700159528H1
ggttcaacgactggcagctggccacagtaacaggcgatggcctacacagtacacaccaccaaaacagcagggattcaacgcgagctcaagcgaccaaggctgcagcaaacaaaagtacctgtagcgctctgtcagaggctgccctcacacacccgcacaggttcaggcatctcaggttcccgcactggctggagaggaacacgagcgccacgtcgctgaaactggagcacccgctgatgttgagcctggtaagctgagggcacccgtgcgccaggg

SEQ ID NO: 1794 - DNA, 273 bp, Zea mays
  misc_feature: Incyte ID No: 700159529H1
tggcttcgtcaggtcacaggagcacagagtgaattgcaagtcgtgttcgtcctctgcttgcaagcccttcctcttgcgattgatccacggaaagatccatcgtcttcgtgaagcaggggaaatccattccttccagccattaatgagatcttcagaacaatggaatggagatgtacaaaaaaaatggttgttgtatgattgatcaaatgtatagaactatttatattctttccaagacaattggctgataggataggaactgttccaggggtg

SEQ ID NO: 1795 - DNA, 276 bp, Zea mays
  misc_feature: Incyte ID No: 700159531H1
gggagctggaggtcggtttctcaactcaaagtcagatgacaaggaagagaactccgactcgagtcacaaagagaatcagaacggagttgcgccccacaggagcggccaaccgtcaacccctccgtctcccaacggtgcatcgtcagctaatcagggcaggcagtcgtgaatgatggatgattcaaaactcacagctgaagagatttcagcccctgagctagatatggcagcagttttgtacagaaaacgctagcaacatggtgtcggtcggtcggt

SEQ ID NO: 1796 - DNA, 214 bp, Zea mays
  misc_feature: Incyte ID No: 700159534H1
  unsure 201: a, t, c, g, or other
cagtaaatagactgaagttgaagcctccgtgctttaccagagacagagagaagaagaatattcattcctcgtatgcgcgacagagctacacccgtagctagtcagcgtgctgtacaatcatgtacaaaatttatgctcgtgataaaactgcgagaggggagctagcaaatgggaaaggataaaggagtttagttgcttctngtacgagacacca

SEQ ID NO: 1797 - DNA, 227 bp, Zea mays
  misc_feature: Incyte ID No: 700159535H1
attacggactggttgctgatctgttcgaggttctggatgagttattgaagaagatcccagagaagaaataagtggccgttaatagttcttcactcctgcatgttcatttgcccatgtggcgctaataagatctcacgatgtcaatcccgtaaaatctgtaatgaattgaaaggtatgaattgaattgggttcaataataaatcagctatggtattaaaattagatgt

SEQ ID NO: 1798 - DNA, 267 bp, Zea mays
  misc_feature: Incyte ID No: 700159537H1
  unsure 118, 124, 135, 149, 152-153, 155, 158, 168, 174, 186: a, t, c, g, or other
ggcttttgcaattatgcatgagatgagcaaattgtcataccgggttacggaagaagatgttatccgtgcacgtaatcagctgaagtcctctatccaactccaccttgatggggcaacngccggngttgaggacanagggcgccaaatgntgnncncangggccggagnaatccnaacccccgagcntttgcaagaatagatgctgttgatgcaagcactgtgaagcgtgttgcaaaccgcttcatctttgatcaggatgttgctatt

SEQ ID NO: 1799 - DNA, 263 bp, Zea mays
  misc_feature: Incyte ID No: 700159538H1
  unsure 30, 83, 91-92, 102, 106-107, 109, 115, 118-120, 122, 134, 136-137, 139,142, 145, 148, 152: a, t, c, g, or other
agcgcgcagcgccgtgtcacggccctacancttcgtcgctttgatgcccggctacctggggaacgtgacgacctacgccctgngcgacgcnncggcgttggngggnntntggggnctnnngngggtttgggggncnnanttnggnagncatncgacggtggactacgacgagtacctccaggagatggtggactgggtggaggtgcacaagacggaaggcctgatggaggcggccgtcatcggagtcggcgcgcccacgctga

SEQ ID NO: 1800 - DNA, 265 bp, Zea mays
  misc_feature: Incyte ID No: 700159539H1
agaggtcactctttgttggaagccggtcagatcctaatgattcagcttcttccctatcattgtcctctccacagatatcagaaagacatgctactatcacatgcaagaataaagctttctatctgactgatctcggaagcgaacatggtacctggattaccgacaatgaaggtagacgttaccgcgtgccaccaaacttcccagttcgtttccatccctccgatgtcattgagtttggttccgataagaaggctatgttccgggt

SEQ ID NO: 1801 - DNA, 261 bp, Zea mays
  misc_feature: Incyte ID No: 700159540H1
  unsure 95, 101, 116-118, 121, 126-127, 135, 137, 148, 157: a, t, c, g, or other
cttctcactctacatgcttcaatgatctttacctacttgacttgcaaactctggagtggtctcaacctgatgcccaaggagcacacataactccnagaagngggcatgcgggggcnnngantttgnnaaaggganancggtggggggnggagaaaangcaaggggtccactgatacagttgtaattaatgcttccaagtttgtgtggtcagtggtcactagcgtctcagctagagatcctctagcttgtgagggtccaccc

SEQ ID NO: 1802 - DNA, 268 bp, Zea mays
  misc_feature: Incyte ID No: 700159547H1
cgatcccagcatccgagagagctccacaggccaggtccccatcgccgcggcgcttgccccacctctcccccgcccggtagtagcctcgccgccgttgccgagatggggttcgtgtccttcgtcgggagggtgctcttcgtcgccgctttcctcctctccgcctaccaggagtttaatgaattcggtgctgatggtggaccagcagctaaggcccttcggcccaaattcaacgtgtttgtcaaaaatgtatctgctcatctgggagtag

SEQ ID NO: 1803 - DNA, 261 bp, Zea mays
  misc_feature: Incyte ID No: 700159549H1
  unsure 111, 257, 260: a, t, c, g, or other
cgacccttgctatggtcgtgccgtcgctcgctgtagccatcctctgcatcctagtccggtccgcctccgcggagttctggctcgacgagttcaccacggacggcgacgtcngcagagactacgaccgttctggccggcagtggcgtcgcttgtcctcgaccagcgttctggcgctggcttcaactccacgcgcaagtacctcttcggcgagtccagcgtggaagatgaagctcgtcgggcggcaactccgctggacntgna

SEQ ID NO: 1804 - DNA, 260 bp, Zea mays
  misc_feature: Incyte ID No: 700159551H1
gtcatctctccgtgcaaaatgtgaagcgggttgtttcacaggcagatggttatcagcctcatttaattgctcctgagcaagggtaccgtgcggctgattgaatcttctctcaattattttagaggaccagcggaagcctctgtagatgctgtgcattctgttttgaaagagctggtgaggatatccattggggagacacaggagttaaaacgatttccatctctacaaacggagctagctgctgcatgctataaggccct

SEQ ID NO: 1805 - DNA, 258 bp, Zea mays
  misc_feature: Incyte ID No: 700159552H1
  unsure 86, 88, 93: a, t, c, g, or other
gcgttgcgtcttgggggagagagagaagtgggagacccgcgagaggctgccgtgtagggactagggaccgtagagtaagcgacagnanagganggagagggggatggccgggatcgggccgatcagacaggactgggagccggtggttgtgcggaagaaggcacccaccgccgctgccaagaaggatgagaaggccgtcaacgccgcgcgccgctccggccggagatcgagaccatgaagaagtacaacgctggtatg

SEQ ID NO: 1806 - DNA, 256 bp, Zea mays
  misc_feature: Incyte ID No: 700159554H1
  unsure 68: a, t, c, g, or other
accgtttctagctagctatgctatgccatgctagccatagccagcggggactggtttctagcgcgcanagggagtacgtacgtgtctttttttttttgtgacgctgatccatcggtcagcctgtgctgattgacgcgaccttcatgcagatgtgcgctacctagctagcttcgttcgtggtgtgtcctctcgtgacccacgagagtgggagtagaataatcatgcattgttgtatgcaacgtgcttagcagcttcg

SEQ ID NO: 1807 - DNA, 259 bp, Zea mays
  misc_feature: Incyte ID No: 700159556H1
  unsure 40: a, t, c, g, or other
atatttaagaagccagttattgtctataactatccgaaangaataaaggcattttatatgagactcaatgatgatgacaagacggtggctgcaatggatgttcttgtgcctaaggttggtgaattgattggtggaagccaaagggaggaacggttagatgttctgaaacagaggatacttgatgctggccggcctttggaaccctatgaatggtacttggacctccgtcgctttggatctgtaaagcacagtggttttg

SEQ ID NO: 1808 - DNA, 80 bp, Zea mays
  misc_feature: Incyte ID No: 700159560H1
  unsure 60, 64-65, 67, 72, 74: a, t, c, g, or other
gtttcagtgtatcagatacatcacatagaaatgtcttcggtgcgttccagaaaaaaaatnaaannanaaagnanaaaaaa

SEQ ID NO: 1809 - DNA, 220 bp, Zea mays
  misc_feature: Incyte ID No: 700159561H1
gccccacagtgcttcaagaagttcgccgagacagccgagaagtgtgtttctgatcagggcatcgaccgcccttcgatgggtgatgtgctctggaacctggagttcgcccttcagatgcaggaaggcgcagaagagagcggaagccttggctgcgggatgtcagacgagggcgctcccttgatggtcgggaagaaggacccgaacgacccatcgatcgagt

SEQ ID NO: 1810 - DNA, 261 bp, Zea mays
  misc_feature: Incyte ID No: 700159563H1
gttgttttggcggcgacgacaaagggctaaaaaacaatcttgccgctccaaccaattcgtcttggttgccgacacggcacctcgtcggaatcaggtggcgcgacctcctcgccggccggcgcgacaccaccatgggcccggaagcagtgcggaaaagcctggagcccaccgcaaccgccgaggaaatcactggctccacccctgcgcggctccacttctacgaccccttcgtcctcagcggcgtccgtatcgaagccgccg

SEQ ID NO: 1811 - DNA, 254 bp, Zea mays
  misc_feature: Incyte ID No: 700159565H1
cgacccttgctatggtcgtgccgtcgctcgctgtagccatcctctgcatcctagtccggtccgcctccgcggagttctggctcgacgagttcaccacggacggcgacgtcgcagagactacgaccgttctggccggcagtggcgtcgcttgtcctcgaccagcgttctggcgctggcttcaactccacgcgcaagtacctcttcggcgagttcagcgtggagatgaagctcgtcggcggcaactccgctgggac

SEQ ID NO: 1812 - DNA, 254 bp, Zea mays
  misc_feature: Incyte ID No: 700159567H1
gtcatctctccgtgcaaaatgtgaagcgggttgtttcacaggcagatggttatcagcctcatttaattgctcctgagcaagggtaccgtcggctgattgaatcttctctcaattattttagaggaccagcggaagcctctgtagatgctgtgcattctgttttgaaagagctggtgaggatatccattggggagacacaggagttaaaacgatttccatctctacaaacggagctagctgctgcatgctataag

SEQ ID NO: 1813 - DNA, 254 bp, Zea mays
  misc_feature: Incyte ID No: 700159568H1
  unsure 88, 93: a, t, c, g, or other
gcgttgcgtcttgggggagagagagaagtgggagacccgcgagaggctgccgtgtagggactagggaccgtagagtaagcgacagcanagganggagagggggatggccgggatcgggccgatcagacaggactgggagccggtggttgtgcggaagaaggcacccaccgccgctgccaagaaggatgagaaggccgtcaacgccgcgcgccgctccggccggagatcgagaccatgaagaagtacaacgctgg

SEQ ID NO: 1814 - DNA, 253 bp, Zea mays
  misc_feature: Incyte ID No: 700159570H1
  unsure 72: a, t, c, g, or other
accgtttctagctagctatgctatgccatgctagccatagccagcggggactggtttctagcgcgcacaggngagtacgtacgtgtctttttttttttgtgacgctgatccatcggtcagcctgtgctgattgacgcgaccttcatgcagatgtgcgctacctagctagcttcgttcgtggtgtgtcctctcgtgacccacgagagtgggagtagaataatcatgcattgttgtatgcaacgtgcttagcagc

SEQ ID NO: 1815 - DNA, 254 bp, Zea mays
  misc_feature: Incyte ID No: 700159572H1
atatttaagaagccagttattgtctataactatccgaaaggaataaaggcattttatatgagactcaatgatgatgacaagacggtggctgcaatggatgttcttgtgcctaaggttggtgaattgattggtggaagccaaagggaggaacggttagatgttctgaaacagaggatacttgatgctggccggcctttggaaccctatgaatggtacttggacctccgtcgctttggatctgtaaagcacagtgg

SEQ ID NO: 1816 - DNA, 251 bp, Zea mays
  misc_feature: Incyte ID No: 700159573H1
  unsure 26, 34, 64, 93-94, 151: a, t, c, g, or other
gcgagatccccgagctgtgcggcacntgccggcnctcgacctctgctactccatgagccagcgnttcctggacgagcaccaccaccagcagcnnggcaaggcggaggaggcgccgccgctcgctccggcctcgccggcgcacgccggcccnccaccaactggaagatctccagccctggcgacagcccggacgaggtgaaggcgaggctcaagtactgggcgcaggcggtggcgtgcaccgtcagctctgc

SEQ ID NO: 1817 - DNA, 254 bp, Zea mays
  misc_feature: Incyte ID No: 700159574H1
  unsure 141, 215: a, t, c, g, or other
gcaagcaggagcctttccgagtgtgtggagcagcagcagccgtaagaaaggggagtgcaaagtaagcttcatatattttccatggcaaagctcttcggaaaggtggcgatcgtcacgggcgccgccagcaaactgggcgangccatcgccaggaagttcgtcgacaacggcgccaaggtcatcctcgccgacatcaaccgccactcctgcgagancatagtagcggctctcaacaagaccaaccacggccccgg

SEQ ID NO: 1818 - DNA, 256 bp, Zea mays
  misc_feature: Incyte ID No: 700159580H1
  unsure 151, 158, 191, 203, 224: a, t, c, g, or other
ctcattattattctcactggtcgatctgctaacacaaacagcagcagctcctcctcactagctagccttctctatttttgctactgcaagtgtccaagtctgcgacgacgtccgagatgtcgacggtgagccgtgcatcccttgaccagangcttgcnctcgccaagcgctgctcccgagaggcgactctngccggagctaangcggcagcagtggcgactatngcctccgcgattcccaccctcgcgagcgtgcg

SEQ ID NO: 1819 - DNA, 246 bp, Zea mays
  misc_feature: Incyte ID No: 700159583H1
gctgatccaagcgagaaagaggctgatgatggtgtatcaggtaaagatatgatgagaaaacatcgccggcaagtgctattcagtggtattatcactgctgttggaattagcttgcataatcttccagagggaatggctgtatttcttggatctgtcaagggtcttcatgtgggcctgaacttggctgttgctattgccttacataacataccagagggggttgctgtagctcttccaatctatttt

SEQ ID NO: 1820 - DNA, 247 bp, Zea mays
  misc_feature: Incyte ID No: 700159586H1
caaacggtgtcatcttcaagaagttccatgagcagagaagcgaagggaacatcatacaactcaccatccatgctttctgtccggtgctcggaccgagaaagcgctcggccgcaaaagttggaccgtggggtgggagcggcgggtctccggtggacatcacggcagagccccagcgtctgaagagcatcaccgttgctactggcatcgccgtgacctcgattgccttctcctacgtcgactccgccgg

SEQ ID NO: 1821 - DNA, 247 bp, Zea mays
  misc_feature: Incyte ID No: 700159587H1
gtgattgtggatagattgactaaagtggctcactttattcctgtcaagactacttataaaggttctcaactagcagagttatatatggctcggattgtgtgtttgcatggagtaccaaagaagatcgtgtctgatcgaggttcgcagtttacctcaagattttggagaagctttcatgagaatatgagtacaaagttgaatttcagtacagcttatcaccctcagactgatggacagactgaaagga

SEQ ID NO: 1822 - DNA, 247 bp, Zea mays
  misc_feature: Incyte ID No: 700159589H1
gtagggccaaatgcaacaccactttgagaaatggactatcttcgcctgcagagtccaacaaagaaccttcattgaagagaagtgttgctcctctgcgggacattggagggataagagcgcgaggttttacgggatcttcctcagcatgcgtttcaccccacaaaacttcaagcaggcatattgatgtgagagcaaacatgtctctcccggtgtctccatgctcaagcccgttacgccagctgaagca

SEQ ID NO: 1823 - DNA, 247 bp, Zea mays
  misc_feature: Incyte ID No: 700159591H1
actgcctgacgccacaaccactcttgcggaaacacacagttttgatttgcaggcattccgttttagtgcagacaaagagtttctgaggcaatcaagagttgttcgagtaggtctaattcagaactcaattgctgttcccactacttgtcactttgctgaccaaaagaaggcaatcatggacaaaataaaacctctaattgatgcagccggcgcttctggtgtcaatattatgtgcttacaagaagcc

SEQ ID NO: 1824 - DNA, 241 bp, Zea mays
  misc_feature: Incyte ID No: 700159592H1
ttctctccttcctatcggctccacacctccacgcaactggaagcttcgctcaatctgccctactcctccgccgcctccaacaccgcagacgcagctgccgcgggcgggagttggacgtgctactctgctctcatctcgtttccgcgcaggaattgttcacaatggcccgcgtgtatgttggcaattggattcacgggtgacttctggggaatcgaagatgagttccgtgtgtttggagttc

SEQ ID NO: 1825 - DNA, 203 bp, Zea mays
  misc_feature: Incyte ID No: 700159593H1
  unsure 80, 99, 148, 189: a, t, c, g, or other
acaaagaaaatggcagcaatcaaagaatttcgtcttaaacatctctttgcaaaccatgaaacagcagcaaatcggataanagtattagaattacttaanaataaacctctaaaattaaaacattataatttgcgcagaattctcaaanactatccaaatatgaatttgaccaaaaaacgataatttaanaatcgtaagcgttt

SEQ ID NO: 1826 - DNA, 247 bp, Zea mays
  misc_feature: Incyte ID No: 700159594H1
gatgactttgacccagatgagatattcagaaacttcttctttggcggtatggcgcctgcaaccaccaggcagtttggacagtttggaactttccattttaggactggtgggatgcatgcccatgcccatgcccaacaaaactctggtggctcaactgtcaggatgcttattcagctgttgcctgtcctactgctgctgttgctcaacttcctgccatcctctgagcctgtctactcgctgtcccgtt

SEQ ID NO: 1827 - DNA, 248 bp, Zea mays
  misc_feature: Incyte ID No: 700159595H1
  unsure 77: a, t, c, g, or other
gccgaccgttccgttcgtgtttgtgcctgcctgtgccttcggttgttcctctgagcgacggcgagtcggcgaccgangtggggttccgagcgccccagcccgtggtggaattcgtttggtctggttattgcgggggaccacagacgcattagctgggtgaactctttcaaaaggggcaggtgcgctagtttgaatggctgctacaaagcttcaggccttttggaaccaccctgctggccccaaaacca

SEQ ID NO: 1828 - DNA, 54 bp, Zea mays
  misc_feature: Incyte ID No: 700159596H1
  unsure 6, 40, 42, 46, 48-49: a, t, c, g, or other
cttgtnaccattttgtaataaagattttccgctgcaaaanangaanannaaaaa

SEQ ID NO: 1829 - DNA, 266 bp, Zea mays
  misc_feature: Incyte ID No: 700159601H2
tctcggagagcctggggcctagaggcgagctacatgaaggaggcgctgggcgagcaggagcagcacatggcggtcaacttctacccgccgtgcccggagccggagctcacctacggactcccggcgcacaccgaccccaacgcgctcaccatcctgctcatggacccggacgtcgccggcctgcaggtgctccacgccggccagtgggtcgccgtcaacccgcagcccggcgcgctcatcatcaacatcggcgaccagctgcaggg

SEQ ID NO: 1830 - DNA, 263 bp, Zea mays
  misc_feature: Incyte ID No: 700159602H2
  unsure 6, 32, 36, 51, 64, 196, 215, 251: a, t, c, g, or other
gttttngcatccagcagcaactggccatgganagcngtgggatcggcagantggcccccctggnggccgtcctcttcgacatcgacggcaccatggccatctccgacccgttccaccaccgggccacctcggagatgctcctcaaggtgggatacaacaacggcgtgcccatcacgcccgagttcggcatggcgancatggccggccggagcaangagcagatcggccgcttcctgttcccggactgggancagcggcgcctg

SEQ ID NO: 1831 - DNA, 258 bp, Zea mays
  misc_feature: Incyte ID No: 700159605H2
cggaccctggcttcttcaccatcctcctgcaggacggcatgggcggcctgcaggtgcgcctcggcgacgggcagaacggcggctgctgggtggacatcgctccccggcctggggcgctcatggtcaacatcggtgaccttctgcagctcgtgaccaatgaccggttcaggagcgtggagcaccgggtgccggccaacaagagcagcgacacggcgagggtctccgtggcgtccttcttcaacacggacgtgaggaggt

SEQ ID NO: 1832 - DNA, 258 bp, Zea mays
  misc_feature: Incyte ID No: 700159606H2
gctacatcaagggggagctcgacgaactcgagcgcgaggactttttcaggctcaagaagatccagggctataagaagagggagatcgagcgccagatggccaacgccaggctattcgcagaggaacagctcgccgaggatctcgcgctgaagaggggcatctccgtgggggctgcggcaaatctgctggctgctggaggggagaaggacgacgacatcatcttttgatcgcctctttccatgctcatccaatcattca

SEQ ID NO: 1833 - DNA, 77 bp, Zea mays
  misc_feature: Incyte ID No: 700159607H2
  unsure 2, 46, 63: a, t, c, g, or other
gnacaaagttgtttctgttagtttggagctggagttctgaatattnacttttataatattaanattggaccgagtcg

SEQ ID NO: 1834 - DNA, 70 bp, Zea mays
  misc_feature: Incyte ID No: 700159608H2
  unsure 43, 50, 52-53, 61, 63, 67, 69: a, t, c, g, or other
gccaaacaccttttggtatataatactacagtttttgagaaanaaaaaanannaaaaaaananaaanana

SEQ ID NO: 1835 - DNA, 256 bp, Zea mays
  misc_feature: Incyte ID No: 700159609H2
cacgggaacacaagctactacagatccagactctttttctcaggcgatgagcaagctccgtcagcggtatgatgaactgaaagagcgctatggggtttctgatattactgtttcagtacaaaatgtggcttctcagcgggggtacagtagcattgacttggtgacgcttgaagacatggtccttgaaatcgtgaggcaaatcgagaagctgatccgtgcaaaggagatgatggaagctgcagggaagccattctaa

SEQ ID NO: 1836 - DNA, 255 bp, Zea mays
  misc_feature: Incyte ID No: 700159611H2
gtggtgggggaattagggcgaatgcggaccatgtcagtgctgcttcggctctacacaagcttgtcatcaattgcggttgcattctctgtgacgtgcattatccggtcagagttgttcttaaaggttatgaagcaaaacacagaggccatcacaagctacgaaatgcttgatgcggttcgtgttgctcttggtatcctgctgcaaatggtggttatagctacaactaccagactcctgcagaatatgtctcctccc

SEQ ID NO: 1837 - DNA, 255 bp, Zea mays
  misc_feature: Incyte ID No: 700159612H2
tttcgtcatcgagcacgctgctgataatccagctagcgactcgcaagctgagtcacagatccaaaggatacagaccttgtaatatcttaatccttctgttttgtaccgaagcgtaccccctagagcatcgttggtttatttgttcgttgaagtgtcacgagggagagaaaaaaaaaaccctgaagtatttcttgttgtaagttgtaaaggaatggaataaaggagctaataatccgaagtgtaccgttggctgaa

SEQ ID NO: 1838 - DNA, 256 bp, Zea mays
  misc_feature: Incyte ID No: 700159613H2
aaattcgtcttgcctccagcaaccctcttgtgcccaaacatcttgcttcacaccacgcctaccatcaattccaaagcctcggaaacctaaatcctcccagaaaaggcttccacagcttgttgtagagcctactgatgcacgttctaattcctttgttggcacacatgagtaccttgcaccagaaatcatcaaaggggatggccatggaagcgctgttgactggtggacgtttggtgtcttcctttatgaacttcta

SEQ ID NO: 1839 - DNA, 255 bp, Zea mays
  misc_feature: Incyte ID No: 700159614H2
gctcattccattagttcgaattggaactctttagtcagtgcgctaagatctctttgtagaggaaatgattggctattgtttctcaaggtttcactatctctgctggttgtcagcatccttagttctatgtcttctcagtctgcatttaaaataggtactgctctggttttcacaggcttcaaagcgtatgagaaatgggaggacaacattgatagtatggtgggcgacgcctgtaccattcttctgcactttggt

SEQ ID NO: 1840 - DNA, 257 bp, Zea mays
  misc_feature: Incyte ID No: 700159615H2
gcctcctgacctcggagcacgatgacggcgccacggccctgagccgggacgccgccgtgcgcctcgtagatagcttctcgacggacaacagcaccgccgactcggtgggcgccttccagagcgacacgccggtcagcagcgtgtctaccacggagttcccggccacccctcagtctaactccagctcggagccgtccgggaacgcccactcgtcggctgaccacaaggcgaaggcagcgtcggagaccgccgacgcg

SEQ ID NO: 1841 - DNA, 260 bp, Zea mays
  misc_feature: Incyte ID No: 700159616H2
gatttttgcagataccatcaggtcgccaatccaatatcttggacactcgtgttcagttccaccaagatcaaatgcactttcttgttgtgcatgaaacccagattgccatctatgaaactacaaaactagaaccagtgaagcagtggcctgttcgagagaattcacctccaatcacacatgccacattctcgtgtgatagtcaactgatctatgcaagctttatggatgccactgttggcatatttaatgggtcgagtttg

SEQ ID NO: 1842 - DNA, 255 bp, Zea mays
  misc_feature: Incyte ID No: 700159619H2
caagaagtataagaagccattagctgaggctatccactccgaaacatcaggaaactatcggacattccttctttcacttgttggtcctggacattaggttatgtttcgaccatgggacatgatattccatccatccaccctaaatgcagcgacctacctggaaaacttatgatgttgccatttgtcagtggtgactcgtggattcgtctaacttccacatatgcggtatctagtatgcttgactaaagtattcgt

SEQ ID NO: 1843 - DNA, 255 bp, Zea mays
  misc_feature: Incyte ID No: 700159620H2
gagaaagagcatcagaaggagtcagaaaggatagagaaggaacttgctgaaatggaggaaatgaggaaaaagatcagtacaatgacagcagatgattactttgagaagtaccctgaactcaggaagaagtttgacgatgaaatccgtaacgataactggggatattgaagagattggagagaactcttatgatgccatttccatgtccgtgaagaaccaataattttcctgtgccctgaattgggtggtttccat

SEQ ID NO: 1844 - DNA, 253 bp, Zea mays
  misc_feature: Incyte ID No: 700159621H2
ggtccccaagaggttgaggctccgttagatccgatgagagagctgagcagactgatatctgaacgcaagtttgacgaagcatttacaatggctcttcaaaggagtgatgtttccatagtgtcgtggctgtgctcccaggttgatttgcgggcactatgtgcaatggttccagtacctcttaaccagggggtccttctggccttattgcagcagctagcaattgacattcacaatgagacatcacggaaggttt

SEQ ID NO: 1845 - DNA, 252 bp, Zea mays
  misc_feature: Incyte ID No: 700159622H2
  unsure 2: a, t, c, g, or other
anctcgtccgagaccatgaagagcagcccacacctggtgctgatcctgtgcctccaggccgctctggtcatgggcgtcttcgccgctttggctaaagaaaatgccctggttgagagcaaggccatcgacatcaacccggggcagctcaagtgctgcaccaactgcaacttctccttctcggggctctacacctgcgacgacgtcaaaaaggactgcgaccccgtctgcaagaagtgcgtcgtcgccgtgcac

SEQ ID NO: 1846 - DNA, 203 bp, Zea mays
  misc_feature: Incyte ID No: 700159627H2
catgggtgcaattcgcttcgcggtgatctcttaagctcatcacatatataaaagcaacctcagtgggctatgtaagacatggcgtgccaaactatcagtgaccactgacagctttgcaatacgttgttgtatggtcaacctgcaaacttggtgtactgctactcgtactataaataacatagggttttaaccttggttgtggt

SEQ ID NO: 1847 - DNA, 250 bp, Zea mays
  misc_feature: Incyte ID No: 700159629H2
  unsure 129: a, t, c, g, or other
cccattccccttccccctcttcgtctccgtcggcggcgtcggaccgaacccgagcccggagccctaactaaccctaggaggcaggcggcggcggggatggtgtactacgcgctgttggtgggcgcggantggatggcctcaccaacctgcagccccgccacggctgcgacgaccccaacttcccctactacctcaagctcaagtgcgagaactgcggggaggtcaccgccaagtccacctacgtcaccct

SEQ ID NO: 1848 - DNA, 253 bp, Zea mays
  misc_feature: Incyte ID No: 700159631H2
ggagatagcttagagaaggggaagcacaaaccagatctacatttgggatatccaatccacgagaagcgacatcagtagcaatcaatatattaaaccgcccatcccgaaatcctgccagtgtcctctctctttcagattgagagatatccccatgaagcgcctcacattggaaacttcgactcatattgtgtgacaatctatctgcatccctttttgtttgtgtaaaaacaatgcacttgccaccttttgcatg

SEQ ID NO: 1849 - DNA, 252 bp, Zea mays
  misc_feature: Incyte ID No: 700159634H2
caagtatctatcaccaccgacaccagtctcggcgtcctcacagatggaggagaaaagttggaatctctcttttacattggtttggaactctatagtgtggcttgtgcttctgaacttctccgttaagataatcacgtcgacggcacaggattatctcaaaaagcagcaggatatggagatggaacgcgtttctgattctccgcccccggaacaaaactaactagcggcgcaagtttatttcagctgctagct

SEQ ID NO: 1850 - DNA, 252 bp, Zea mays
  misc_feature: Incyte ID No: 700159635H2
  unsure 42: a, t, c, g, or other
ctcaccatgtcgtcggaaaaggaggcggcgctcgccgccgtngctcgatgacagcccaaccatatttgacaagatcattaaaaaggaaataccttctactgtggtttacgaggacgagaaggtactggctttcagggacatcaaccctcaagctccaacacacattctcatcatccccaaagtcaaggatggactaactggcctggcaaaggctgaagagaggcacatagagatacttggctatctcctcta

SEQ ID NO: 1851 - DNA, 248 bp, Zea mays
  misc_feature: Incyte ID No: 700159637H2
atccaaatcacgcagaagctgtcgtccctgcacatggcggttctcgactgtgatccatttccgagcttcgaggaatcgacagtcaagcttcagtgaccaagagactgaactctccgagttctacgaggctgaagatcctgagcatctgtttggtgaaggttgcctttggtgcaatctatgctcaggtagagaagaaggcgtcgaggcggatctccaggagttccaggactttgacgagttctaggcgt

SEQ ID NO: 1852 - DNA, 247 bp, Zea mays
  misc_feature: Incyte ID No: 700159638H2
atttcagctgaagtcctctatccaactccaccttgatggttcaactgccgttgttgaggacattggccgtcagctgctgacctatggacgaagaattcctacccccgagctttttgcaagaatagatgctgttgatgcaagcactgtgaagcgtgttgcaaaccgcttcatctttgatcaggtactgttttggcaacctagaacctctcaccctgtagaacgttcagcatctttatgcttccttctc

SEQ ID NO: 1853 - DNA, 237 bp, Zea mays
  misc_feature: Incyte ID No: 700159640H2
ccacgctgtcgaattcatcggccacaacggaggattggcttcacaggatcggctgcgtctagcagctagcattttgtgtctagagtctagactggacgaccagagtcgagagacatttcagtcgggccacggccatattttagttctttatttaaggaaacagtatattttcattcaattgtctgatgatgtagtaaaactagtaacacgtataggggtggtcacaaatcaggatcc

SEQ ID NO: 1854 - DNA, 246 bp, Zea mays
  misc_feature: Incyte ID No: 700159641H2
atgaagaatggtctcgcaatgcaagactcgatggtacgaaggaaaacgatgcgcttggattccgtgaaggaacgatttctttgtcagcacctcagaatttggccacttgaaagaatctgatgcttgaagtttcctggttctgtgtacacaagtcggctcaatgtcagaattgagccgcttgaaatatatttagttatattctatgcggagagtaggtcttggaaacagccttttccacaataatgt

SEQ ID NO: 1855 - DNA, 244 bp, Zea mays
  misc_feature: Incyte ID No: 700159642H2
  unsure 12, 75, 92, 219, 226, 234: a, t, c, g, or other
ggaaagggtacnacaacaatgattttatgggtctcttgtaacgcataccctgtcctgttgagcatgttcagcgangtttaggattgctaganggcaggccacggcgtctattgctgtaacttgtttccgtgttaattaagtggtgcggtatacatgttgaggcagttgggttcgtcttggaatgctatatcctataactacttgggtgtttggttcgangaatganatattacntcatcttctc

SEQ ID NO: 1856 - DNA, 246 bp, Zea mays
  misc_feature: Incyte ID No: 700159644H2
gggttcttcagcctcagccacgacggaggtaaggacggctcaaggaccctagagatagagatcgtatggtccaataggccatccaacgactgtatgtagcgtacggatgatttacctgacgccaattcttgtactcttggcttccatgtaaatcagcccccccataatcatccgaattcatttatttgtacgtagaaagttaagacacttagataactcgcgccatcattcaattattgaggtcat

SEQ ID NO: 1857 - DNA, 249 bp, Zea mays
  misc_feature: Incyte ID No: 700159646H2
atgccatcttcatctttggcagaggtactgaagcaattgaaggacaaatcattaaagcgagcagggctgactgaagaacaattgcaagagcagattgagcagagaaatgtcgcaaggaagaataagcagtttgagatatctgatggaatcaggaaaaaccttgctaccaaaggcatcgccctgatggacgaaccttctggtacagtatggagaccatgcgaaccagagcggtctgaagagtcatgatta

SEQ ID NO: 1858 - DNA, 264 bp, Zea mays
  misc_feature: Incyte ID No: 700159650H1
  unsure 252: a, t, c, g, or other
ttcttcgcaggctgagcagcaaccgccccaatctgcagttcaagaaccgcccacgcagaacccctccgccctccgctccttccaacttgctctctacctgcaccagcctcgcccacccttcgctcgccgccgccatggggaggggaaagttcaagggaaagcccaccggccgccacagcgtctccacaccagaggagatcgctgctggtacttcaggtcgccctcgcacctttatgaagacatgcaattganaaagagaattga

SEQ ID NO: 1859 - DNA, 267 bp, Zea mays
  misc_feature: Incyte ID No: 700159651H1
  unsure 111-131, 159-160, 179, 183, 186, 188, 190, 194, 197, 201, 230: a, t, c, g, or other
ctgagagcacaatccaagcacagggtcagtctgagttcctcaagcagcagatccaacgcagccagtcattcaatgagcagaagccccagatgcaacaccagcaagaatcannnnnnnnnnnnnnnnnnnnntgtctgccagtcccccaacatcagcaanngcaacaacagatttgaccnactnccngncnatanctnatgnattatcaccggtttctcagctgtcgccantttctcagtcttcacctatggcgctgcagactatatt

SEQ ID NO: 1860 - DNA, 263 bp, Zea mays
  misc_feature: Incyte ID No: 700159653H1
  unsure 65: a, t, c, g, or other
gtgcgcgcgtggcgtgccagtcgcgtcgcgcgcgctggcgcctactgttcagtacaacgcgaacncaacggtttctctccatctctccgtgtgtgacagtgtgtgtgtcgtagctatagcagtgcccggtgcggactgcgagtgacatgggctaaataaagtgtgcgtcgtctggtctggtggtggtagtggggcgcggtgccccatgtgtgccgctgcagcttgtgtctctgtgttgcttcatgttctctgtctatctactc

SEQ ID NO: 1861 - DNA, 265 bp, Zea mays
  misc_feature: Incyte ID No: 700159654H1
  unsure 40, 97: a, t, c, g, or other
gctacatcaagggggagctcgacgaactcgagcgcgaggnctttttcaggctcaagaagatccagggctataagaagagggagatcgagcgccaganggccaacgccaggctattcgcagaggaacagctcgccgaggatctcgcgctgaagaggggcatctccgtgggggctgcggcaaatctgctggctgctggaggggagaaggacgacgacatcatcttttgatcgcctctttccatgctcatccaatcattcaatcgccc

SEQ ID NO: 1862 - DNA, 265 bp, Zea mays
  misc_feature: Incyte ID No: 700159656H1
cagatattccagtagtgcaggtatctgaggaccttgttgtgaatgtttcacgggcattacggaatgacatcaacagagcgcttcacttgttccgtgagatcgcaatggggcatgatctgaagaagtttttgggtgtgatcgtggggctgtgggttctctccggagttggaagcagctgtgacttcctcacgttgacatacattgccgtcctgatgctccacacggtgccaatcttgtacgacaagtaccaggacaaggtggacca

SEQ ID NO: 1863 - DNA, 264 bp, Zea mays
  misc_feature: Incyte ID No: 700159658H1
cacaaggtttccatcgaaggttcaagagcacataccccaggtggagtagcaagggaatctctcccatggagtccacaaccataaattgtgattatataagtagcgtgatgtaggacacatacaatgaaggccaggatgtcacaaggctacctaactgtatatttgcatgcagctgagtggctgactgaggccacaagtttgatctaactttgtacttgtacacagggttgaaaaacaggaagaaggtacattttgtttttgtaa

SEQ ID NO: 1864 - DNA, 265 bp, Zea mays
  misc_feature: Incyte ID No: 700159660H1
  unsure 103, 178: a, t, c, g, or other
ctgggctcggcggggatccgcccctgcagcatgcccttcggcgccgaccagttcgacccccacacggagtccggcaagcgcggcatcaacagcttcttcaacnggtactacttcacgttcacggcggccatgatgatctccgccaccgtcatcatctacgtgcagagcaacgtgagcnggcccatcgggctgggcatccccacggcgctcatgttcctggcctgcgtgctcttcttcatgggcacgcgcctctacgtgcggatga

SEQ ID NO: 1865 - DNA, 263 bp, Zea mays
  misc_feature: Incyte ID No: 700159661H1
  unsure 13, 30, 33, 88, 112, 120, 129, 132, 134-135, 147, 156, 172, 190,194-195, 197, 207, 210, 213-214, 229, 235, 237, 261: a, t, c, g, or other
gcgcctccacgcngccctggacccccgccnccnacccgcggccctcggcggggcgctgcctcacggcctctcgccgggctccgtcgcnggtcatcgtcgcccaggggaaggncaagaagnaccgccagncananngacagacgacanagaagaggnggggaagaaagggganacactgaaggtgcgagcngganncnaccgcaactnccnccnncccaagggcaaggcnacactncngaccccagaagtcctcaaggaaangc

SEQ ID NO: 1866 - DNA, 265 bp, Zea mays
  misc_feature: Incyte ID No: 700159662H1
gaagacacagaggctgcaaatgaggctggagaagatggtgcttcggaggaaggtaaaggtacagatgtggagatgaaagatgctgaaaacgctgaagacgagaagaaagaggtcccaaatgcagatgctgcagagaagactgaggaaggtgaagataagaaagaggaggcccctgctgtagatgcagcagagaagactgagaaaggtgaagataagagagaggaggaggcccctgctgtagatgcagcagagaagactggtgaga

SEQ ID NO: 1867 - DNA, 132 bp, Zea mays
  misc_feature: Incyte ID No: 700159663H1
  unsure 28, 76, 98, 106: a, t, c, g, or other
gtcttgtttactttgcgcttttcaaacnatatttgaacactgttaagtcgatcatacttgaattgtactgcatctnatgtttgtgattgtcatgtaanctgaagangcctctgtattgtggtggcttgtttc

SEQ ID NO: 1868 - DNA, 266 bp, Zea mays
  misc_feature: Incyte ID No: 700159664H1
  unsure 2, 154-175, 208, 243: a, t, c, g, or other
angcgatcggggctcaacagcagcctgccactgccgccactggctttctgagtagccggagccaaacacaaaggagggtaggaatagctgtggtgactcggaagagaaagagacagtcgacgccttgttttgttgatgcttagtgtggtgaccnnnnnnnnnnnnnnnnnnnnnntcttggcacaagttacatgctggggatagctanaggaggtacctgttgaggtgtgtaagacagtagcnagcaaccgtatgccttggtttcc

SEQ ID NO: 1869 - DNA, 261 bp, Zea mays
  misc_feature: Incyte ID No: 700159665H1
  unsure 100, 154, 156, 159, 163-164, 173, 180, 184, 186-188, 192-193, 196, 204,217, 224, 226, 236, 241, 243, 259: a, t, c, g, or other
cagagctgaggagctgcgtaatcttttgacccagctcagaccattttttgcagttattcctaaggcaaagactgcaaaaattgtccgtggaataattgangctgtcgccaagatacctggaacatcagatcttcagatttcactctgcaaggananggnagannggccccggncagaaangcgnannntccnncancgtgttgnggcaaggtggcanctctccngntagagaatcnggagnanatgtaaccccttcccngc

SEQ ID NO: 1870 - DNA, 155 bp, Zea mays
  misc_feature: Incyte ID No: 700159666H1
  unsure 11, 24, 26, 93-94, 102, 121, 134, 139: a, t, c, g, or other
gctagattttnttttatagttttngnatccttgagatatgattgtcttcctctgtcatcctatctttgtctatggcttttgccatctacaaanncatcgggnatccaacactgtatatgcnatacagacatganaaacntgattttgccatcaaa

SEQ ID NO: 1871 - DNA, 258 bp, Zea mays
  misc_feature: Incyte ID No: 700159667H1
  unsure 235: a, t, c, g, or other
gctgaacacaatgttcaccttgtcactgttcctgctgctaagactcttggcgagtgggctgggctttgcaagattgactccgagggcaaggcaaggaaggttgtaggctgctcctgtgtcgttgtcaaggactacggtgaagaatctgagggccttaacatagtgcaggagtatgtcaagtcgcactagatgtaacacgtttcagtaatactctacatttggatctgggcttaanattatgcttgcgtcttgggcttg

SEQ ID NO: 1872 - DNA, 260 bp, Zea mays
  misc_feature: Incyte ID No: 700159670H1
  unsure 52, 203: a, t, c, g, or other
gagaaaccctcgggaccgatgatgaagaagtgaggcccgttcgacgtttgcnaaatgttcggtagaaggttcgaaccaaaaatcatcgtcgatctcgtgatttcgagtttggtttagttatggttcgttacacgtgatgcggaggacaagagccgagttgatctcaaaatgatgctggtgaacgaaccagcggaatggatganctgatcaagtgctaggacggaagatgctcaccaagtggtcgtcatctaaccacacta

SEQ ID NO: 1873 - DNA, 262 bp, Zea mays
  misc_feature: Incyte ID No: 700159671H1
  unsure 2, 56, 103, 146, 213: a, t, c, g, or other
anccggcctccttcacccgtgccaagaaatgggttcaagaacttcaagctcaaggnaatcagaataccatagtggctcttgctggaaacaaggctgatatgcnagatgcgaggcaggtgccagcagaggaagcaaaggcgtatgcncaggagaatgggctcttcttcatggagacatctgctaaaactgcaatcaatgtgaatgacatatttnatgagattgcaaagaaattgcttcaagggcaacaagctccaagcccaca

SEQ ID NO: 1874 - DNA, 260 bp, Zea mays
  misc_feature: Incyte ID No: 700159672H1
  unsure 234: a, t, c, g, or other
caaaaatacacgacaacaactggatgatatacgatctaaacttctggataatctttcaaaacttcgacatgctcctagtgtccactttcaagagagagttcctgacacagaaatacctgagcaagatgaagaccaagatgatccagatgaacgacatgatcctgactctgatatggaagtggatgatcacaaggctgtggaagagtcatcgaggaggagcattctaggtataanaatcaagagagaatttggtgaaaatg

SEQ ID NO: 1875 - DNA, 127 bp, Zea mays
  misc_feature: Incyte ID No: 700159673H1
  unsure 39: a, t, c, g, or other
agaagttcgtcttcgtgccggacaaggacctggacaggncgctccgcgaggccatcgacgactcccagctgccggagatctatggtggcaagctcaagctcgtcacgccggctgcaaaattaccaag

SEQ ID NO: 1876 - DNA, 259 bp, Zea mays
  misc_feature: Incyte ID No: 700159675H1
agctcttggtccgttctggggttttcagcaaggttgggcaaagtggctcagcggtgtcatagataatgccctctatccagtcctatttctggactatgtcaagtccagtgttccagctcttggaggtgggctcccaaggaccttagcggtgcttatcctcacagttgcgcttacatacatgaactacagagggctgactatagttggctgggtggcagtctttcttggggtgttctctcttctcccgttctttgtgatg

SEQ ID NO: 1877 - DNA, 259 bp, Zea mays
  misc_feature: Incyte ID No: 700159677H1
  unsure 35, 238: a, t, c, g, or other
aacagaaatctgcgtctgatgatagagatactacnatttctgttttactcgaagacataccaggggggaggttgggtccgcaatggattcggcccacacccccaagacttcctttatttgatggggagctacaatggctgaaccctgacaataaccacgagctattatgggattatagcatgtgtgctgacacgaatcgaggggctgctatccgagatttgattgcaagagccttaanaggtccacttgcacctattca

SEQ ID NO: 1878 - DNA, 211 bp, Zea mays
  misc_feature: Incyte ID No: 700159679H1
  unsure 210: a, t, c, g, or other
gtcgatcatatatgcatgtttgtacgtgtttgtgtcataataaatcgatcgatcatgttgtttaccctttttatttcggtatgtagttgcatctgcgggcgggctaaaataaatcacggcaggctgggcttcatcaagcccatgtatccagctgtgtgtaataatgcaatggaaaacgaaccaaaaagaatgcttccattccagcaaaana

SEQ ID NO: 1879 - DNA, 262 bp, Zea mays
  misc_feature: Incyte ID No: 700159680H1
  unsure 137: a, t, c, g, or other
acatgtcgaggaggaagaccagggagcccaaggaggagaacgtcacccttggacccactgtccgtgaaggagagtatgtctttggtgtcgctcacatctttgcatccttcaatgacaccttcattcatatcactganttgtctgggagggaaactctggttcggatcaccggtggcatgaaggtgaaggctgaccgtgacgagtcgtcaccttacgctgctatgcttgctgctcaagacgtcgcacagcgctgcaaggagct

SEQ ID NO: 1880 - DNA, 253 bp, Zea mays
  misc_feature: Incyte ID No: 700159682H1
ctgaaaagcttttttgggacaaatatgagaaggccaagtttgtctatagcaagctgtggaatggttcttacttcagttatgatgatggcgacaacaaaatgagcacatctatccaagcagatcaattggctggacaatggtatgccaaagcctgtggtctcttcccaattgttgacaaagacaaggcacaaagtgcgctagagaaggtatattctttcaatgtgatgaagttcaagggtggtacaagggagcc

SEQ ID NO: 1881 - DNA, 254 bp, Zea mays
  misc_feature: Incyte ID No: 700159685H1
  unsure 7, 65, 122: a, t, c, g, or other
cggacgntggtcgacggatcgaattaggctctccgagtctccggttccctcctctcggcggcggntcaggtccctctccatctccggcgtggcgcttggcgtctgacctcaacaagcaaganagcaaatggcaggcggcagggttgcgcatgccaccctcaagggcccgagtgtggtgaaggagatcttcattggactgaccctgggtctgatcgcgggaggcatgtggaagatgcaccactggaacgagcaga

SEQ ID NO: 1882 - DNA, 135 bp, Zea mays
  misc_feature: Incyte ID No: 700159688H1
ccaaaaggtttctgtgtttctttccaaatcctgttggctaggttatcaaaggacatttaccccttgtcgtgatattctgagttggaaggcctgttaattgtgtgaatcgtattatccttttgcctggacgcaaaa

SEQ ID NO: 1883 - DNA, 257 bp, Zea mays
  misc_feature: Incyte ID No: 700159691H1
  unsure 47: a, t, c, g, or other
gcagacagaaggacaggcaggcagcgagtgcaaacaaccgcgagagnattcagcgattgggctccttcttctcgaccttagtgacgccccctccgcccgccgccgacgacccgaactgcgccgtggtggccgcgcactccaaggccacctacgacgagcagtgggcggcccacaagagcagcagcaagctgatggtgatcgacttctcggcgtcctggtgcgggccctgccgcttcatcgagccggccttcaaggag

SEQ ID NO: 1884 - DNA, 254 bp, Zea mays
  misc_feature: Incyte ID No: 700159692H1
ggggaaaggaagcatcacaatactaagaacaaagggctgagaaccggaaaataccttcgatccttatttatctgctagtctctccatttatcagatgagaaaggggagaaggcagctccttggtggtcaattgtgcaagtctgagcacctgaaacttccattgattcacagttcaaggctgagcctgaggatgccattgattcttatttatctgccattctctcgattgcttttggcactttggtcaatgtgca

SEQ ID NO: 1885 - DNA, 258 bp, Zea mays
  misc_feature: Incyte ID No: 700159693H1
  unsure 27, 100, 193, 218: a, t, c, g, or other
gactacctggctgtgactgcggcgaanaacgcgaacattcctgccgcactccgcggggcgctactccaagaagcggttccgcaaggcgcagtgcgccatncgtcgagcgcctcaccaactcgctcatgatgcacgggcgcaacaacggcaagaaggtcatggccgtccgcatcatgaagcacaccctggagancatccacctgctcactgacgccaancccatccaggtggtcgtggacgcgattatcaacagtggac

SEQ ID NO: 1886 - DNA, 123 bp, Zea mays
  misc_feature: Incyte ID No: 700159694H1
  unsure 5: a, t, c, g, or other
cgttncttgtagtagaggtcggcagcaagcggtggtagagcgagaggtcgagaagatgaagagcagcactctgttggcgatcctagttctccaggcccttctggtctctgcggccgtggccaa

SEQ ID NO: 1887 - DNA, 258 bp, Zea mays
  misc_feature: Incyte ID No: 700159696H1
gaaccctgcaactgcaacaagccctgacgcttaatacatcggccggcactcgatcggcagcagatcaaagatggcggcggaggagggggagaaggcgaagagcggcggcggcgggcagcagatgacggtggtgcgggggctggacgtggcgcggtacatggggcggtggtacgagatcgcgtcgttcccgtccttcttccagccgcgggacggccgcgacacgcgcgccacctaccggctgctggaggacggcgccac

SEQ ID NO: 1888 - DNA, 232 bp, Zea mays
  misc_feature: Incyte ID No: 700159702H1
  unsure 186: a, t, c, g, or other
gcttcctccgcgtacgcctcatggtccaagcggtggatccgtcccgaggtgtacccgctgttcgtgccgatggccgtggccctgggtatctgctcgtaccagcttgtgcgcaacatcacgggcaaccccgaggtgcgggtgaccaaggagaagagggcggccggcgtcctggacaaccacgacganggcgagaggtacgccatgcacggcctcaggaagttcgtccgcggga

SEQ ID NO: 1889 - DNA, 267 bp, Zea mays
  misc_feature: Incyte ID No: 700159703H1
ctgagcatttcatcaaagaaggtctgactagccttgttgagtacaatgaaaagaagatgtttgaagttaaacttaaagagataaagtcaacactgaccactatgatcaatgatgaggctgcaatacctgaagtgattgagactgtcaaacagcaagttaaggatgctaaatttcctgatctagaggtcattcgcatgttgtgggatgtgctcatggaggctgttcagtggtctgggaagaaccagcaacagaattctaatgcagcac

SEQ ID NO: 1890 - DNA, 235 bp, Zea mays
  misc_feature: Incyte ID No: 700159707H1
atgggggaatgaataattgtaccgagatgttggcgccgtgtcgtgtcgtgccctgtcctgtcctgtcctgtccttcctggggctcatctagcagtcagactgtgttgtgttgtgttgtgctgtgtgggccgagtgtgcactacagcatcgggccatgcccctgttcgatctgtctgcgactttaatttgtttgtgctgtgtcatctatctatctaatccatctatgctatcctct

SEQ ID NO: 1891 - DNA, 244 bp, Zea mays
  misc_feature: Incyte ID No: 700159708H1
gaaaaatcgtagtcatgtttggactttaactttgttttatgttggaaagtacttgaaagacttttcctgtggtaattctaggcgtaggttgctgtgctggttggggtttactggtgaaccagagtttttctatctcccactatgaatttgttacctcaagttacctggatgttcactattttgttggtacatgtcgattttgcctcgttcatgcatgtccactgagtgagtatgcgcatgtgtt

SEQ ID NO: 1892 - DNA, 267 bp, Zea mays
  misc_feature: Incyte ID No: 700159709H1
acggactttactggaagtgagcataatgatgagttctatatggatgaggctggaaatgtgaggacacgaactaatcgctcaggcggtgttcagggagggatatcaaatggtgaaattatttacttcaaagtggcttttaagccaacagcaactatcggaaagaagcaaaatactgtgtcaagggagcatgaggatgttgaacttttggcaagggggcgccatgacccctgtgttgtccctcgagctgttcctatggtggaatccatg

SEQ ID NO: 1893 - DNA, 269 bp, Zea mays
  misc_feature: Incyte ID No: 700159710H1
aacttgtcaatataatggttttgacttgggacttcccgaacctacgaagtacaatggagagttccatgtcaaagtagaagttaacataaacggcaagatgataagctgtactgcagcaaaccggaattcaaaagatgctagaaaagtagctgcacaagaaacactttcgaaactgaagaattatgggtacaagcataaaagaaagtcgctggaggaaattttgcgttctaccacgaaaaaagaatcggaactgataggctatgatgaag

SEQ ID NO: 1894 - DNA, 271 bp, Zea mays
  misc_feature: Incyte ID No: 700159715H1
ctttattctttgttagactagtcacagtccaagggagtcacagattaacaagataatctgatgatcatcctgtgttatggacacagtgcattgtggtttaccaacctggacgacttgacaaaggtttaagccaaggtggcgtagatgtgactccctacaattttgtattgcagaaaccgttgagatctgaggcaaggcattatatatattttttgggcgagacatgctcggttcaataaatatttgtgtgttcgctttgcatatatggtaa

SEQ ID NO: 1895 - DNA, 273 bp, Zea mays
  misc_feature: Incyte ID No: 700159716H1
  unsure 23, 88, 139, 185, 194, 219, 272: a, t, c, g, or other
agatcatgatgccgtaccctgangacgtcacgctctcggtgcagctgctgtccttcgcgtgcggcggcttctccgtcgtgtgggccancaacaacctcctcaacgacggcaacgccatcaccatgtgcgtcaggatgtngtccgagctggcacggaccggcgggagcatcgccaccgtgggagcngtgtcagtnaaccacgaccgctcgatgttccgcncgcgcaacccgccggcctacaacgacgcgctcgacgccatgttcgccacgtang

SEQ ID NO: 1896 - DNA, 64 bp, Zea mays
  misc_feature: Incyte ID No: 700159717H1
ctcgaggtcaccaaatttctggtatctgatacacctaataaatatcagtcaccaaatttttgct

SEQ ID NO: 1897 - DNA, 264 bp, Zea mays
  misc_feature: Incyte ID No: 700159718H1
ctggtagtgccgagaattgtcttggaagcacttcctgctgttttactattcgaaaagaagcaaaaggcaaaagctattgatataatagtgagtgaatgcagggataagggctatgacggtattgtgctcgagtcctggtcaagatgggctatttatggcgtgctggatgatcaagagctacgttacatggcacttgaatttgttaagcagctgggagaggctttgcattcagtcaattccaaatcaagtagccaccatttggaa

SEQ ID NO: 1898 - DNA, 263 bp, Zea mays
  misc_feature: Incyte ID No: 700159721H1
ctgaaaactctttacggtctcctgatgcttttgcctcagcaaagtgcggccttcaagatcttgaggactcgactgaagactgtgccattcagtgaaaatcttaagcgcacatcttcagcgaatccatactctcagattctgcaagtgacggaagatggcaatagaaaccaagatatgcagaactacagtgcaatcaatttcccattccttctccagcaatttgagaacatgcagctgcagcatcgtaaccatttgaaggatca

SEQ ID NO: 1899 - DNA, 263 bp, Zea mays
  misc_feature: Incyte ID No: 700159722H1
gctaaaaagtgtggatccagaccggatcattctgaagaaaattgttctgaccgggtatccacagagagtctcgaaactgaaatcgatcgtgcggtatatgttccacaatcccgacgacgtaaaatggttcaagcctgttgagttgtggacaaaacatggtcgtcgtggccgcatcaaggagactgttggtactcatggtgccatgaaatgcttattcaatagcagcattcagcagcatgatactgtgtgcatgagcttgtaca

SEQ ID NO: 1900 - DNA, 265 bp, Zea mays
  misc_feature: Incyte ID No: 700159723H1
  unsure 70-97, 223: a, t, c, g, or other
cgcgccgccgcgatgagagggtgagtactgaggaggagggtttccgatggagaacggcgaggatacgttnnnnnnnnnnnnnnnnnnnnnnnnnnnnttctccaccaacggcggggacggcacgcccaagctccacgacgctgcggacgagatcgagtccctccgcgcggcgaacgcgacctggaggagaagctcgatgccgtgcgccacgagaaccagttcntgtcctccgagtcccgccgccttgaggttctcgtgtcccagg

SEQ ID NO: 1901 - DNA, 262 bp, Zea mays
  misc_feature: Incyte ID No: 700159724H1
tttcacgcaacatcctccagcagctgcaggagatgggcatcattgatgtcgatcccaagggtggacggcgcatcacctcccagggaaggcgtgatctggaccaggtggctggaagggttgctgttgaagcttgagcaatctcatatttggtttctatgatgtcatgtttgattgttgagatggctacactttatttgcactttggattaggatttttgtgttaagagaactcaaggcattctagctatggttcacactgtat

SEQ ID NO: 1902 - DNA, 262 bp, Zea mays
  misc_feature: Incyte ID No: 700159726H1
gagaagagagtccatctgctcgttgccttgattttgtggaacgaagcgatggctcgcagcggcgccatggtttcctgcatgctgctcctggtggtggcgcaactgctcatggtgatggccacgcagacagcggcggcggcgggcgaccaacgcggagctggacgccggctgctgtggcaggtgacctgccactacagcgcctgtaactgccgcacttgcccgacatatggctgggcgtgctgcagcattgctgctagctagc

SEQ ID NO: 1903 - DNA, 264 bp, Zea mays
  misc_feature: Incyte ID No: 700159727H1
tgtgttcagagagcctattatatgcaaaaacgttccaagacttgttccaggatggactaagcccatctgcattggaaggcatgccttcggtgatcaataccgagctaccgatgcagttctgaaggggcctgggaagctgaagctagtttttgagggaaaagaagaacagattgatctggaggtattcaacttcactggtgctggaggagttgccttgtctatgtacaacaccgacgagtcaatccgagcttttgctgaggcttc

SEQ ID NO: 1904 - DNA, 214 bp, Zea mays
  misc_feature: Incyte ID No: 700159728H1
cccgtcgttctggaagtttccacgctccggcctccgccccctggtctgagtggtctccgctccaatggcgccctcactcctcgccgccatgtccacctcgcccttcctagccagcagcggcagcagccgcaggccgctagggctgcccacacccgacgggctggactgcgcgtggccgcgttaagtacgaccctgccaagtggcgccgcagaac

SEQ ID NO: 1905 - DNA, 267 bp, Zea mays
  misc_feature: Incyte ID No: 700159730H1
tgctaacttcaagagagttgaaattactgaagatgcaaaaccagattggacagacaaagaaactcttcacttgcttgaggctgtcttgcattatggggaagactggaaaaaggtgtctgaacatgttagtagtcggtcagaaaaagattgtattgcaagatttataaggctaccttttggagaacagttcatgggacacaaggaggatagaatgaggtttgagaatactgatgagcctggagcaaatgtctcaaaacgactacgtct

SEQ ID NO: 1906 - DNA, 266 bp, Zea mays
  misc_feature: Incyte ID No: 700159731H1
ctaaggaaaactttgagctggctttggagattgacaatggtaatacacatgcgaggtattggctgggaaaaatgcatttcaagtatcatgttcctggtgcttgcaaggcagttggtgctgctttgttggttgaagctgcaaatatgggtgatccagatgcacagtatgaacttggatgtcgactaagaattgagaatgactatgttcagtcggatcaacaggctttccattacattgagcaagctgttgatcagctgcaccctggt

SEQ ID NO: 1907 - DNA, 269 bp, Zea mays
  misc_feature: Incyte ID No: 700159732H1
cctggaactagggttgcttataggatgacagttcggcaattggaagcattgattcggctgtcagaagctattgctcgaagccatttagaaagagttgttctcccagctcatgtccgcctggcagttaaattgctcaagacatccatcatcagtgttgagtcaagtgaagttgatctctctgacttccaagatgctgaagatggaacaaatgtaccttctgagagtgacgccggacagccagctgaagaagatgctgctcctcagcagca

SEQ ID NO: 1908 - DNA, 234 bp, Zea mays; identical to SEQ ID NO: 374
  misc_feature: Incyte ID No: 700159733H1

SEQ ID NO: 1909 - DNA, 258 bp, Zea mays
  misc_feature: Incyte ID No: 700159734H1
  unsure 241: a, t, c, g, or other
gttcctcaagggcctcatgggcaggcagaaccgcaccccgaccatcgtcgtcgtctgggccatcctgctggcgtccatcttctccttgctgtgggttcgcatcgaccccttcaccacccgcgtcactggcccggatacccagacgtgtggcatcaactgctagggaagtggaaggtttgtactttgtagaaacggaggaataccacgtgccatctgttgtctgttaagttatatatatatnagcagcaagtggcgtta

SEQ ID NO: 1910 - DNA, 258 bp, Zea mays
  misc_feature: Incyte ID No: 700159740H1
ctccaaacaaatagagttttccttcaccgagccagacccagaagaaggggagccggaggtagaaagaccagagaagatggcgaccaccgagccggcggcggtgaggctggtgggctccttcgccagcccgttcgtccaccgcgccgaggtggccctgcgcctcaaaggggtgccctacgagctcatcctggaggacctggccaacaagagcgagctgctgctggcacacaaccccgtgcacaaactcgtgcccgtgct

SEQ ID NO: 1911 - DNA, 257 bp, Zea mays
  misc_feature: Incyte ID No: 700159741H1
aaatagtgggcaaggcagttccagcgctccatctgcatcacaagctggtggttctcaccgtaggcaagaacctgcacaggccagctttgctcacttcggtacggcttctttcagctcgttcggtctcccaccgagtggtcagttgggaccaacaactggcaatttcggcttcgggatggttcccccaggcatgacgatcccagtgccctctctaggatcgcttgcccctgtaaagatggttggaaattcatcagcta

SEQ ID NO: 1912 - DNA, 87 bp, Zea mays
  misc_feature: Incyte ID No: 700159742H1
  unsure 37, 41, 49, 60, 64, 69, 72, 75, 80, 83: a, t, c, g, or other
ctttttgagactcgaaattggaaaacgatcaatcaanaaanaaaaaaanaaaaaaaaaanaaanaaaanaanaanaaaanaanaaaa

SEQ ID NO: 1913 - DNA, 256 bp, Zea mays
  misc_feature: Incyte ID No: 700159743H1
aggagctgcaaatctgatggtcctaatggcttgagttgctacggtgtttggtaaagctggttgtgatggctgtacccggatacatgcgcatactgtttcgacgccatgtagggggtatctgatcaaagttcgctgtctgatgcctgttctaatttagtggagtattactggcaatgtggtacaagcatcttgtcttgaaaatcgaaaactgcacggtatgtgtgcgccattttttgtctgatgaggtgtgttccat

SEQ ID NO: 1914 - DNA, 258 bp, Zea mays
  misc_feature: Incyte ID No: 700159745H1
cttgagcactattgaactaaggattccaaatagttctttggggtctattgtcggtgctggtggggtcaatctagcagagatccgtcagtttctggtgcaagactgaggctacatgaggctcatgctggttcttctgagtctgtggtggagatccagggcacactggaccaagcaaaagctgcccagagcctcctgcaaggctttattagtgcaaacagccggcagcaacagcagccctattcttctcgcatgccactt

SEQ ID NO: 1915 - DNA, 261 bp, Zea mays
  misc_feature: Incyte ID No: 700159746H1
aagattgtctcgactggcgcgacacctgaatgggatgaagcctttgcatgggcatttgacagtcctcccaagggccagaagcttcatatctcctgcaaaaacaacagcaaatttggaaagaaagcattcggtaaagtgacaatccagatcgacagggttgtcatgttggggtcagtcgcaggtgagtacaccctgctacccgagagcaaaagcggccccaatagaaacctggaaatcgagttccagtggtcaaacaaataa

SEQ ID NO: 1916 - DNA, 261 bp, Zea mays
  misc_feature: Incyte ID No: 700159747H1
  unsure 117: a, t, c, g, or other
gctgatccaattccatccatagtactctgtctagcagcaatttgtatgtaagacaaagtcaagcggagatgggattggggacgaatcatggatggtggaggttgcgcatcgcgacanggaggaagaggatttcttcgccgtagagttgctttgtttgtttttcctttttgccctggactcttctgttttccttcttaacgagaggaagctgtttctggtacaatgcagaaagaaggcttctggtaatttttagaaaaaaaa

SEQ ID NO: 1917 - DNA, 263 bp, Zea mays
  misc_feature: Incyte ID No: 700159748H1
  unsure 233: a, t, c, g, or other
caactgtgtggcaatattacagcggagttcaatgattgctcaaaacaagtccttgaaataatttccctgctctcaatgccagaatttagtcgcagcgatcttgccgatttactgaagggtgttcaagcacatgagaaagagaagttgcatttgacagctaagattcaggtgctgaagaaagccggcaggccttcagagcgcctggtgaaccacgcagactgcaggtcgcgcanatggcccagcacgtgtgcgtgcacgtcaag

SEQ ID NO: 1918 - DNA, 265 bp, Zea mays
  misc_feature: Incyte ID No: 700159749H1
atcgaagaatatctggagaggtttggatggcagccacaagaccgaagaaaggttttgggtggagcacaaaagctgctccaagaatacgatgtatcacaaatgaacaaatattttcaagaagtgaacccaggaccgaagtagaaggactatacaggaaatgagcctcaccacttccagtccagatttgaggaaccaaaaccatccagagcatttgcgttctgcctcactggttatggatcaccggcacaaagtggactaccttcgg

SEQ ID NO: 1919 - DNA, 263 bp, Zea mays
  misc_feature: Incyte ID No: 700159750H1
  unsure 149, 157, 175, 178: a, t, c, g, or other
gttcatcctctgatacaagtgacaacaagaagctcttcgccatagtccagccgatgctggtgtacaccggcttgattgagcagctacaacagttcttcaagaagggcaaatcgtcccagcttgattcaagacggatgagaaagatgaantctctgcnagctccagcaatgggagntcnaatgaaagagaagctgggcaacatgaaggagatggtggggctgtccaaggacctgctctcatggcttgaagacatgacctcgtca

SEQ ID NO: 1920 - DNA, 184 bp, Zea mays
  misc_feature: Incyte ID No: 700159752H1
gtggtgacaagaaaggcaagggaacctctctgttctaagcgtatcataaacttgctcagggtctcaagtatctgtcagaatttaccattacaaacaccctgtgcttagcttctgcatatgttcttttgtcacatctttttggtacgttgtagtttgtatgagaccaagctattgtttcgtgtta

SEQ ID NO: 1921 - DNA, 127 bp, Zea mays
  misc_feature: Incyte ID No: 700159753H1
  unsure 79, 97, 113, 115, 117-118, 120, 123: a, t, c, g, or other
gttttgttaaaaaaaaggtaaaacaaaactttgtttgaagaaaagttccatgtgaagtacacaaggaacttttcttcanacaaagttttgttaaaanaaaggtaaaacaaaananannanaanaaaa

SEQ ID NO: 1922 - DNA, 246 bp, Zea mays
  misc_feature: Incyte ID No: 700159754H1
  unsure 193, 222, 239: a, t, c, g, or other
gtaatctgcactgcggatagccttagtggtaaaacactgtttttctctgtcataatggctgcacagacagaattggtgcattctcatcagaatcctcagtaaatgggcaagtagcaaatgggagatggcttgaaacttagcatgtgattcacattggattatggaacagtggatgactgtagagtgttactgntcttttcccgagcagacttaagattgctntaagatggcagaaacantaatgtc

SEQ ID NO: 1923 - DNA, 259 bp, Zea mays
  misc_feature: Incyte ID No: 700159755H1
gtcaaacattaagcacaaagagactcaggtcttgtttgatctcttcatcatgacgatcaatggcgccgagcgagacgaacatgagtggaaaaagataatttccgaagctggatttagcgactacaaaatcatacccgttctaggtgttcgatccatcatcgaggtctacccatgattatttggcgaatacgtgtttcgtttttttctgaataagttgtttggttaactagcatgggacgagtgtccatgagatcatgtg

SEQ ID NO: 1924 - DNA, 258 bp, Zea mays
  misc_feature: Incyte ID No: 700159756H1
ggacgagctggtcaaagtaagttatacatgtccgccgtggctcgagaagatgggcggtagcgtggagagcaatgattagaggttacttttgcatgcaaaaagtggatttggatgctaatggcgaggttagataggatgttaatgcctttttaatggagtacgtgcacttgttgcatgcgagatgcaatcatgcaaagctcccgtttactgctctgccatgctatcctccctttctgccaacagtactctgcgctcctc

SEQ ID NO: 1925 - DNA, 256 bp, Zea mays
  misc_feature: Incyte ID No: 700159759H1
taatcagcaaagtgttcactcaaatcttttcatttattaatgttcagttatttaatagtcttcttcttcgccgggagtgttgttcatttagcaatggggaatatgtgaaagctggattggcagaattagagcagtggtgcatttatgcaactgaagagtatgcaggttcttcctgggaagaattaaaacatattaggcaggctgttggattccttgtgattcatcaaaagccaaagaaaacattgaaagaaatcac

SEQ ID NO: 1926 - DNA, 257 bp, Zea mays
  misc_feature: Incyte ID No: 700159761H1
  unsure 89: a, t, c, g, or other
cccggactaccccaggtacctggaccgctgccacctcaacgcgtcggtgaccgaggacggccaggtgatgccggcgtgcgtgccgggcntcgcccccgccgtcgtcctcgccaactacaccaagtcgcagtacaaccggttcctcaacgacagccagttctccggcgccgggatcgcgagcgagggcgactgggtcgtggtcgtgctcagcaccagcacgggatccggcgactactcgccggctccgccgggctcca

SEQ ID NO: 1927 - DNA, 73 bp, Zea mays
  misc_feature: Incyte ID No: 700159762H1
  unsure 41: a, t, c, g, or other
ggggggtaggatttgtaagacctgaaattggtaagaaaaanaataaagataaataaatacatatattataaaa

SEQ ID NO: 1928 - DNA, 257 bp, Zea mays
  misc_feature: Incyte ID No: 700159763H1
gctgatcggcttcttcggcagcccgtacgcgttccgcgcggaggcggcgctgtgcctgaaagcgtgccgtacgagctgatcctggaggacctgttcggcagcaagagcgagctcctgctccaccacaaccccgtgcacaagaaggtgcccgtgctcctccacggcgacggcagggccatctccgagtccctcgtcatcgccgagtacgtcgacgaggccttcgacgggccgccgctgctccccgccgacccctacgc

SEQ ID NO: 1929 - DNA, 256 bp, Zea mays
  misc_feature: Incyte ID No: 700159766H1
aggagatctcgagcaaggcggaggcggaggagatgaagacgttcgacccgtggccggtcttcttccgccgggagtggaagcgcaactggcccttcctcacgggtttcgccatcaccggattcatcatcacgaagatgacggccaacttcaccgaggaggacctcaagaactccaagttcgtccaggaacacaagaagaagcactgacgaaccaggtgaaggagttgtcagaaacgcatgtttggccagccagttct

SEQ ID NO: 1930 - DNA, 253 bp, Zea mays
  misc_feature: Incyte ID No: 700159769H1
  unsure 30: a, t, c, g, or other
gacaaggttcggaatgatggcagctcagcncaaggcgttcttcgatgccaccggtgggctctggagggagcagagcctcgctggcaagcctgccggcatgttcttcagcactggaacccagggtggtggccaagagactacaccgctgacggcgattacccagttgacgcaccacggcatggtgtttgtgcccgtgggctacaccttcggcgccaagctgttcggcatggaccaggtccagggtggcagcccc

SEQ ID NO: 1931 - DNA, 149 bp, Zea mays
  misc_feature: Incyte ID No: 700159770H1
gagattttttcccttttcctttaattttcctatatcacaaagaagaaccgaaaggcgagaggatttcatttcacaggtcgacttgcttctaccatctggttgtttgtggacagtattttggtgctgatttcgttatctggagtgatgtt

SEQ ID NO: 1932 - DNA, 252 bp, Zea mays
  misc_feature: Incyte ID No: 700159771H1
cttcggcaacgaaactgaggcaaagatctttgccaaagtcagaggatgggagactgagaatattgaggagattgctttgaagatctctcaacttcctttggcttcaggcaagcaaaagaggattgctgtgattactcaaggtgctgatccagtggttgttgctgaggatgggaaggtgaaaacgttccctgtgatcctattgcccaaggagaagcttgttgacaccaacggcgcagtgatgctttcgttgga

SEQ ID NO: 1933 - DNA, 253 bp, Zea mays
  misc_feature: Incyte ID No: 700159772H1
tcataaggttgttcaacgccactttcatgatctttcacaacgatatggcaagataattgttgctgacttgactgataaacgaggtgatgaaggagatttgagcaatgcatttgctgctgaaatggacagaattcctggtgtcaggtatatacattttgatttccatcatgtttgtcgtggaggtaactttgacaatttgcaagctctctacaatcaaattgaggaagctattcataagcaaggatattttctt

SEQ ID NO: 1934 - DNA, 252 bp, Zea mays
  misc_feature: Incyte ID No: 700159773H1
  unsure 182, 238: a, t, c, g, or other
gttccgccggccctagatcatcatcatgtgccagagcttcgacatgccccacctgcatattatcgcactttggctccatctggtgattcatactatcggtctgttgagaatctggtgcctgagcgatatgcagacagaaccatggctgacttgaccactagagatccaattattagggatcncacagcactaccaggggaggcacttgctcgagcagaccgcttggatgatctctacngttctgatcgtgtg

SEQ ID NO: 1935 - DNA, 252 bp, Zea mays
  misc_feature: Incyte ID No: 700159774H1
  unsure 64: a, t, c, g, or other
ccgccgtgccgacgtcgacggtgcctgcgctgggcgtgccaccgatccccgcgttacccaaganccccgcgatgccccctatgccggctgtacccgcattgccaaaggtgacggtgacgctgccgccgccgatgcccgccgtcgtcgtccctaaggttggcgccttgccgccgatgcccgccgtgcctaatttgacactgccgccgatgccctcgatcccgggcgtgcccatgccgtttgtggcgccgcctc

SEQ ID NO: 1936 - DNA, 251 bp, Zea mays
  misc_feature: Incyte ID No: 700159775H1
aaaaagatgcaaagtattgttcctaataaattaacttctggcacagtccaatgtgcctttgatgatgtaaatatagaccacccagacttcctgtatatccaatctttaggagaatctggtataatatccagcaagttgtcaaactccttggaaacattaacaactggctctccttcccagggaaattccttgttcctacctgatagttacctctctcgtttcgatcttgtcaactggaaagtgcttgtgga

SEQ ID NO: 1937 - DNA, 251 bp, Zea mays
  misc_feature: Incyte ID No: 700159776H1
ggacattcaagggccacgatgtttctcatatgtaataatgcagcacaaggcattctatcttcattcttcttcaagtatgcagacacaattttgaagaagtattcgtcaactgttgccacgatatttactggcctagcttctgctgcatttttggggcataccttgaccattaattttctcctgggcatatcagtggtgtttatttcaatgcaccagttcttctctccacttgctaaagtcaaagatgacaa

SEQ ID NO: 1938 - DNA, 238 bp, Zea mays
  misc_feature: Incyte ID No: 700159778H1
tgtgtatgcacgaaccatggtgctcatatatatgcaattatatatgcacgcgcaactatacgcgtgccaagctaaatagctgctgcgtatatatactactactactgtgtacatgtgcgtgtatgaactgtgtgtgtatggtctcaagtcactgcatgtgttcgtggctgctttccagatcggtcagtgtgttttctcggtttgcttttggatctgcacatcaagttgttgtatcacc

SEQ ID NO: 1939 - DNA, 131 bp, Zea mays
  misc_feature: Incyte ID No: 700159779H1
taaccccgtcgcttccggctcccgcagcgtcgccgaccttcacagccggttccttcctctgccaccatggggaagacacgtggtatgggagctgggcgcaagtcaagacccaccgcaggaaccagaggtgg

SEQ ID NO: 1940 - DNA, 255 bp, Zea mays
  misc_feature: Incyte ID No: 700159780H1
aagcaacaaacttggcattcttgcctgttcttaattattgccaggacaggagaaacaaagatgaggcctcagctgatactcgtcggcactctggctgttctcgccatcctcgcagctctcggcgaaggctcgtcgtcctggccctgctgcaacaactgcggtgcttgcaacaagaagcagccgccggagtgccagtgcaatgacgtgtcggtcaacgggtgccatccggagtgcatgaactgcgtcaaagtcggt

SEQ ID NO: 1941 - DNA, 117 bp, Zea mays
  misc_feature: Incyte ID No: 700159782H1
  unsure 62: a, t, c, g, or other
attggtcaagagcccgatgcattagatttgttcaaggagtgtcattacagcaggaaaaaganatgttacacatctaccgtgcaacaagctataactcaaatggataagaagcggtct

SEQ ID NO: 1942 - DNA, 245 bp, Zea mays
  misc_feature: Incyte ID No: 700159783H1
cgaacttgcgttcttgtagtagaggtcggcagcaagcggtggtagagcgagaggtcgagaagatgaagagcagcactctgttggcgatcctagttctccaggcccttctggtctctgcggccgtggccaaaggacctgcagggccgacgacgaagaagcagtgctggtgcggcgagtgcaccagctggtcgggcgtgtggacctgcgacgacctcctcaccaagtgcgccgccacctgcaagaat

SEQ ID NO: 1943 - DNA, 247 bp, Zea mays
  misc_feature: Incyte ID No: 700159786H1
atgcaagtgactcggactccgatgatgcaaatgatgatgccaaccaatgacagtcagttacaaattgagttattattagttaggagattcacagggattgaattacttggtggtttatgcatttatctctacgttgaatcactgtcacactgagcttgtggtgattagccagattaggtgtcctgacctttgttgttccgtgtgtcactgttgcttgctctatggcgcaatggaattcctcaggtgt

SEQ ID NO: 1944 - DNA, 245 bp, Zea mays
  misc_feature: Incyte ID No: 700159787H1
ggaacgtggtgctggagcaactcttgcctgtggtactggtgcttgtgcagtggttgttgcagctgttcttgagggtcgagctgagcggaaatgtgtagttgatttgcctggcgggccattggaaattgagtggagggaggatgacaatcatgtttacatgactggtcctgcagaggtcgtcttttatggatctgttgttcactaggtactggggaccaagatagaagggttggctgccactcaga

SEQ ID NO: 1945 - DNA, 128 bp, Zea mays
  misc_feature: Incyte ID No: 700159791H1
gttttgtagccggatggtttgggagcatggtccggtcttctatggattgttccatgcttctgaactgcaatgtctatgttttgtgctactttggttgtttaatgccctaatcattgcatatagattcc

SEQ ID NO: 1946 - DNA, 246 bp, Zea mays
  misc_feature: Incyte ID No: 700159792H1
  unsure 226: a, t, c, g, or other
gcggtactcaccaccggcttactactatacagcctaccacaggcacaacattatgggaattctttccacaacaagaatgatgactagtcagcattcatttcttcattggtttataatcacccttcactccaagatggtgcgccatctgggttcgaaaggttggagcagaagttctcctgagggccaccagactgttgtatgttgtatgaaacatatcatatatatntacccaccaataaaggtgag

SEQ ID NO: 1947 - DNA, 246 bp, Zea mays
  misc_feature: Incyte ID No: 700159794H1
ctcgtgttcctcatctttctatcgtgactgaatttctgccaaggggtagtttatttcggttaatccataggcccaataaccagttggatcaaaaaggcgtttaaggatggcacttgatgtggcacgtggtatgaattatttacacaattgcaccccagtcatagttcaccgagacttgaaatctccaaatctacttgttgacaaaaattgggttgtgaaggtctgtgattttggtttatcacgtct

SEQ ID NO: 1948 - DNA, 249 bp, Zea mays
  misc_feature: Incyte ID No: 700159796H1
ggaaggtctcgtgataaggtttttgactttgtgaagctaaatgaattgtactacgctggaagccatggaatggacataatgggccctgttaggaagactactgactccaatggcgtggaatgtattcggtcaactgatgtgcatggtaaagaagtcaacctgttccaacctgctagtgagtttttacctatgatcactgaggtgtatgaaaaacttggtgagagtgttaaggacattgatggtgcaagg

SEQ ID NO: 1949 - DNA, 220 bp, Zea mays
  misc_feature: Incyte ID No: 700159804H1
ggacgacgaagacgaggacgatgatgaagatgacgaagaccagccaccttccaagaagaagaaatgatttgctcatccatggatttacctcagcttctccatgctgttagttgtgttgtttagatcatggacagctttgggatcaatgtagcttgttgcttgtcatggtatcgtagtgtaggaaaatttgacatctgatgttaaatcactatcctgcttt

SEQ ID NO: 1950 - DNA, 254 bp, Zea mays
  misc_feature: Incyte ID No: 700159807H1
gccaaaggagactagatggtggttccatgacgacacggtgtaatgatctccgtggcattgcctgtcagccttctgtactgtgaactgtgatatatctcttcaagggggagatgagatgatttaggcctatttctaagcagccctctattggattgcgaacttaccttgctgtggtggtatgtaaatgagttgctcacatgtgtcagtctgggaatatgtgttatcaccatcaatgatataatatatagaataag

SEQ ID NO: 1951 - DNA, 192 bp, Zea mays
  misc_feature: Incyte ID No: 700159809H1
  unsure 42, 52, 85, 104, 111, 119, 121, 136, 156, 181, 191: a, t, c, g, or other
gtgacgttgctctagatccgttcatcctggtggttttgtgangtcgaaagcngcgagcgaattagaagatgctggacaagctgtnggacgacgtggtggccggncctcgcncgacgacngncctcgagaagctccncaaggccaccaccgcccgcncgctcgtcatcaacaaagacgcggncggcggcagnt

SEQ ID NO: 1952 - DNA, 254 bp, Zea mays
  misc_feature: Incyte ID No: 700159810H1
  unsure 77, 111, 135, 163, 191, 205, 209, 213, 225, 237, 239-240, 246, 253: a, t, c, g, or other
ggagcttctgcacgcacacacaaaaacagatagacacgggacaacctccgccgctgagagttttcgtgcgcttgtgncatcctcttcctccgctgcgtacagtggtacggncgtacggctctatcgacagacgancatggacatggacttcaatggagacgcngacagcttcgccctcgacttcatccgcnacctcatgctcggnggcnacanagcatccccgtncccagccctgtngnngcttcntccgacna

SEQ ID NO: 1953 - DNA, 146 bp, Zea mays
  misc_feature: Incyte ID No: 700159811H1
acaagtggcgctctactgtgattgctgtgttgagacatgctttcttagtttctttccatgtttctcggatctgttgtgttacctttattactgtgcatttgcatatctactgtgatgctatatatgcactgtgccgtttgtttcct

SEQ ID NO: 1954 - DNA, 255 bp, Zea mays
  misc_feature: Incyte ID No: 700159812H1
  unsure 207, 233, 235, 237-238, 240: a, t, c, g, or other
agcttggtgccaagctgaccaagctcaccaagtctcaggccgactacatcagcgtgccgatcgagggtccctacaagcctgcccactaccggtactaggcacacggcttgcagctcactcgggccgttgtgtgctatgaagttcgctacactggcctgtcagttatcttttgcatgcatatgcattatcatatacgcagtcgcgtanaggttttcttatggttatcgcttgancngnngngggagggaaggagct

SEQ ID NO: 1955 - DNA, 257 bp, Zea mays
  misc_feature: Incyte ID No: 700159813H1
  unsure 246, 248-249, 254: a, t, c, g, or other
tctggaaccccggcttcgacttcgacgacaaaatcctcggcttcatcaagggctacaagcgcacctttaatctcgcttgcattgaccacagaggcacaccggagcatccggcgaggacctgcacgcttgaaaccgacgacgaggccatatgctggggaattgcatattgtgtcaagggtggtccagaaaaagagctaaaagcaatgcagtacttggagagaagagagtgtgagtacgaccagaagntnnctttnttt

SEQ ID NO: 1956 - DNA, 258 bp, Zea mays
  misc_feature: Incyte ID No: 700159814H1
  unsure 232, 246, 255: a, t, c, g, or other
cccccttcaactccaccgggatgaagcgcgcaaaaacagggcggtaatctctgttctgaaagccttcatccccccaaatcaatcatggttcaatgcccaattattacacaagctactgctggagatgattggtgatgcatatgctgggatcatcagtgatggcctatgcctgtcatgatctgtgcgctttatcgacaggcacaaaaacatgcctgtgctgtgcttggacgantggtctcggggttnttgttgacncca

SEQ ID NO: 1957 - DNA, 251 bp, Zea mays
  misc_feature: Incyte ID No: 700159817H1
ggaagattgaaattccgctacccaacgagcaatcaagaatggaagttctaaaaatccatgcagccggtatcgccaagcatggggagattgattatgaagcagtcgtgaaactagctgaaggtttcaatggggctgatcttcggaacgtgtgcaccgaagctggcatggctgcaattcgtgcagagagagattacgtagtccacgaagacttcatgaaggctgtgaggaagctaaatgatgcaaaaaagctg

SEQ ID NO: 1958 - DNA, 244 bp, Zea mays
  misc_feature: Incyte ID No: 700159820H1
  unsure 167, 178, 182, 187, 194, 200, 202, 204-205, 209-210, 226, 236, 242: a, t, c, g, or other
agagaaggcaccagacaccgccagtaagcatgaggcagagaaggcaccagacatcgcgctatcctccgcatccgccgcccgtcggcttcgtccgctgcgagaattctcgtgtcgcccatcggcgacaactgtccgggtgctgcaaccaccgacggtgtgcgggtacncttacggagcncggnggcgnggacganccctgngngnnactnntatttttgggtggganaggacccctnttgctngt

SEQ ID NO: 1959 - DNA, 250 bp, Zea mays
  misc_feature: Incyte ID No: 700159821H1
ctttagtcggccatctgaagatagaactattccattaagtgttattgctgagcagactaagctttcaatcagtgatgtggagtatctccttatgaagagcctctcggttcatcttattgagggaataattgatgaagtggacagtacagttcatgtttcgtgggtccagcccagagtgcttggaatcccacaggttaaggctttgcgcgaccgcctggatgcctgggttggaaaggtgcatactacattg

SEQ ID NO: 1960 - DNA, 252 bp, Zea mays
  misc_feature: Incyte ID No: 700159822H1
gccgccgtcggatcggatccgatccaaagcaagcagcagcagccggctccgcctcccgcagcagccacaccccgtccgtcaccagaggaagaggaagaggaggatgtcggggtcgaaggtgtacacccttgaggaggtggccaagcacaacaccaaggatgactgctggctcgtcatcggcggcaaggtgtacaatgtgaccaagtttctggaggaccaccctggaggtgatgatgtcctgctgtcttccac

SEQ ID NO: 1961 - DNA, 251 bp, Zea mays
  misc_feature: Incyte ID No: 700159823H1
  unsure 242, 250: a, t, c, g, or other
ggatgtcaagaaggaggctccaaaggaggcccccaagccaaaggtggttgaggcaccagcagaagaggaagcaccaaagccaaagccaaagaatcctcttgacttgctgccaccaagcaagatggtccttgatgactggaagaggctatactcaaacacaaagactaacttccgggaggttgccatcaaaggtttctgggacatgtacgacccagaggctactctttgtggttctgtgatanaagtacanc

SEQ ID NO: 1962 - DNA, 251 bp, Zea mays
  misc_feature: Incyte ID No: 700159824H1
  unsure 93: a, t, c, g, or other
ggtcgacatgtcgtctccgccgccgccggtgaagctgatcggcttcttcggcagcccgtacgcgttccgcgcggaggcggcgctgtgcctganagcgtgccgtacgagctgatcctggaggacctgttcggcagcaagagcgagctcctgctccaccacaaccccgtgcacaagaaggtgcccgtgctcctccacggcgacggcagggccatctccgagtccctcgtcatcgccgagtacgtcgacgaggc

SEQ ID NO: 1963 - DNA, 190 bp, Zea mays
  misc_feature: Incyte ID No: 700159826H1
  unsure 16, 26, 39, 79, 85, 107, 119-120, 139, 144, 150-151, 170, 182, 184, 187: a, t, c, g, or other
caacaaggcagcagcncaagcaaganccacacctcctcncttcgcctgtgatcatgtcgtcttgctgcggcggcaagtncgggtnctgctccagcttctcctgcggnagggatgcaacnnctgcggtatgtaccctgangtggngaccgnngccaccagcagcgtcaagnccacggtcctcncngcnccg

SEQ ID NO: 1964 - DNA, 253 bp, Zea mays
  misc_feature: Incyte ID No: 700159827H1
  unsure 119, 247: a, t, c, g, or other
tgaagtgacaaagattgcacggctggcaaaatcaaaagtagagcaactgaacaaagataatgctgtgaacagaggaaaaccaggatttggcaagggatcgggtgtggaccgatcccggnacaacaaccactgtcgcattgacaaagaagttgagagaacgtatactggagtttcagacattacgagaagaaatccagcaggaatatcgtgacgtatggagcgtcgtgttttcactgtgacgggggancgtgct

SEQ ID NO: 1965 - DNA, 253 bp, Zea mays
  misc_feature: Incyte ID No: 700159829H1
  unsure 215, 229, 239-240, 245: a, t, c, g, or other
gggatttgtcagggaggacttggaatgcagtcattacatgaagaactttgatgtcggacatgtgcctttaaggttagcaaaggccaagcaactgcttgggaccatcaaccacaacttcggaacgctcgccttttgccggcggtacttggaccgccttggtgagaccaagtacctcatggctctgaagaatctttgtgacaatggcatcgttcagngtaccctcccctgngcgatgtgannggganctacctcc

SEQ ID NO: 1966 - DNA, 256 bp, Zea mays
  misc_feature: Incyte ID No: 700159830H1
  unsure 234, 245-248, 255: a, t, c, g, or other
ccctaacagccgttttttcccagtttgggaaaattcttgatgtgcttgctttcaagactttgaagcataaaggtcaagcttgggttgtcttcgaagatgtcgcatcagctactgaggctctgaagaggatgcagggctttcccttctatgacaaaactatgagaattcaatatgccaagaccaaatcagatattatagcaaaggctgatggcacctttgtacctcgagaaagangaaagagggcnnnngaaaaant

SEQ ID NO: 1967 - DNA, 242 bp, Zea mays
  misc_feature: Incyte ID No: 700159835H1
  unsure 231: a, t, c, g, or other
ctcgtttcaggcctgacgtccgtctccaactcgactactatactaccgccgcgctctgctcctgcaccagccgggtcagctgaactgagcatcatatcatggagggaggagccgttcccaagccatcggagaagagggtggccctcgtcacgggcgggaaccggggcatggggttcgagatatgccggcagctggcgtccagggcctcaccgtcgtcctcaccgcgcgganagacgcggggc

SEQ ID NO: 1968 - DNA, 68 bp, Zea mays
  misc_feature: Incyte ID No: 700159837H1
  unsure 27, 44, 48-49, 52, 58, 63, 67: a, t, c, g, or other
gttttgaactagatgtgtatggaaganatctgatcttctttaanaaannaanaaaaanaaaanaaana

SEQ ID NO: 1969 - DNA, 184 bp, Zea mays
  misc_feature: Incyte ID No: 700159839H1
  unsure 2, 10, 20-21, 77, 83, 87, 117-118, 120, 129, 141, 143, 146, 165, 170,179, 181, 183: a, t, c, g, or other
ancaaaagcnacaaggcagnngcacaagcaagaaccacacctcctcccttcgcctgtgatcatgtcgtcttgctgcngctgcnagtncgggtgctgctccagctgctcctgcggcanngntgcaactgnctgcggtatgtncnctnacgtggagaccgccgccancagcngcgtcaagncnang

SEQ ID NO: 1970 - DNA, 248 bp, Zea mays
  misc_feature: Incyte ID No: 700159841H1
  unsure 141, 143, 170, 184, 186-192, 194-196, 221-222, 231, 247: a, t, c, g, or other
acagtacgtacaagcctcatcagctcgctagcatagcagcaaccagcaatggactccaccaagttatccgcgctgctggcgctcgccatgctcgcgctctcctcgtcgccgctcgctctcgcgtgggagaaggcggagcgnanatgccactcgtgcgagtccggctcgcngccctcgaccggcntnnnnnnncnnncaatcagcataccgtcagtcccacnnccccctgtnagtataccgtcggtcng

SEQ ID NO: 1971 - DNA, 247 bp, Zea mays
  misc_feature: Incyte ID No: 700159843H1
  unsure 16, 20, 88, 194, 227, 231, 239, 242: a, t, c, g, or other
agataactctgcgcantgtncccaaattgacacggagcaactgctggcccatctagtagaaacagaaatgataaagagaacgaaaganggaaggtacaagggaaggaagttcagttcagtatgtcatttctttggatatcaggctcgaggatctacaccatcaaatttcgactgtgactatgcttatgctcttnggcgtatctccctgcatatggttacagttggantgantggtacanggnagctg

SEQ ID NO: 1972 - DNA, 249 bp, Zea mays
  misc_feature: Incyte ID No: 700159847H1
  unsure 189, 215, 223-224, 242, 244, 247: a, t, c, g, or other
aaggagactacttagacgacaagaaaaacttcacggaatggctcgaggctcactctccggtgaaagctgcggaagacgctaagccactgttcgccgctttgaagaaggaagggaagtccgtcgcggtgggaggctactgctggggagggaagctgagcgtggaggtggggaagaccagcgacgtcaaanctgtgtgcctttcgcacccgtagagngtcatgcnncgacatgaaaagaggtgnantgnct

SEQ ID NO: 1973 - DNA, 253 bp, Zea mays
  misc_feature: Incyte ID No: 700159848H1
  unsure 196, 207, 214, 222, 245, 248, 250: a, t, c, g, or other
agcacatctccgtgccatggagattgccaaagaggcaggtgcactgctctcttatgacccaaacctgagggaggcactatggccatcccgtgaggaggcccgcacccagatcttgagcatctgggaccaggcagacattgtcaaggtcagcgaatcgagctcgagttcttgacaggcatcgactcggtggagtacnattttgtcatnaagctgnggcggccnaccatgaaagcttctcctagtgnctntnggg

SEQ ID NO: 1974 - DNA, 257 bp, Zea mays
  misc_feature: Incyte ID No: 700159849H1
  unsure 10, 12: a, t, c, g, or other
cgccgcgcgntnccagctcaggcggcgcctgtttgagctctccctcggcgtgctcatggagaccatcgcgcggaccaagacctcccgctccgaggcgtgcgccgccgacactgacgtgtcgcccgaggcgagcgagttgacgcggatctccgaagagatcatgccctacctcggcacggccaacctgtgggactacctgccgttcctgcggtggttcgacgtgttcggcgtgaggaaaaagtcatggccgccgtgag

SEQ ID NO: 1975 - DNA, 256 bp, Zea mays
  misc_feature: Incyte ID No: 700159850H1
gtccctagatcgatttgcttaagctggtatgtgccaccccctgtgctggtgaccacgcgtgcagttctcccacctcgccatggctcggacgtccttaggagttgctggcccgtatgaagcttgttccgtaatcatctcagagctcccaaaataaagagcgaagattcaagatgaagtggttgctaaagaggactctactccaatgcctgctcatcaagtggatggagccatctaactggggtttaatagagggatt

SEQ ID NO: 1976 - DNA, 255 bp, Zea mays
  misc_feature: Incyte ID No: 700159852H1
  unsure 20, 27, 131, 138, 140, 148, 153, 155, 159, 176, 194, 196, 198, 206, 211,233, 251: a, t, c, g, or other
catccattcatctacacacncattgcngcacatacagctagctagctcgttactgtttttgcagctgatctgatcgaccgacgcgacccaccgatcacgatcatgagctaccaagcgggctacccaccgcngggccancnggcctacngcgcncntccnccggcgtacgtcgcgcnaccgccggcgtacccgcnancngcccaggncggcngcgcggcgtactacggccagcngcagacaaccaccaccancagc

SEQ ID NO: 1977 - DNA, 53 bp, Zea mays
  misc_feature: Incyte ID No: 700159853H1
agagagagaggttgtgagttcgaatctcaccatttacaaaacatataagtttt

SEQ ID NO: 1978 - DNA, 253 bp, Zea mays
  misc_feature: Incyte ID No: 700159854H1
gagagaggggaagggatcgagagcgcggcggaggcgatggcgagcggagggaagggactcaacgcgactggggagttcttccggcggagggacgagtggaggaggcaccctatggcggggaaccagctgcgccacgccacacccgggctcggcatcgccatcgtcgccttcgggatctacctcgtcggcgaggccgcctacaaccgcctctaccgcccctccggcgacaaccaccactagatcgccggcagat

SEQ ID NO: 1979 - DNA, 255 bp, Zea mays
  misc_feature: Incyte ID No: 700159855H1
  unsure 41: a, t, c, g, or other
aattcaggtggtccagcttttaatgatagaggcaaatgtgncggtatagcatttcaatctcttaaacatgaagatgccgagaatataggctatgtgataccgactccagttattacacatttcatcgaggactacaaaaattctggaggatacacagggtttcctatactaggagttgaatggcagaaaatggagaatcctgatctccgtaaagcaatgggaatgaaaccagatcaaaagggtgttcgtgttagg

SEQ ID NO: 1980 - DNA, 130 bp, Zea mays
  misc_feature: Incyte ID No: 700159856H1
  unsure 4, 8, 11, 59: a, t, c, g, or other
gacntggnctnctgaataatagagagaatttaatgttccaaatgtggtgcgatatgganaatgatgatgactatatgtaatttattactatccatcgtcatatatttttgttgggcctttgccaacattt

SEQ ID NO: 1981 - DNA, 257 bp, Zea mays
  misc_feature: Incyte ID No: 700159857H1
gtggttggttcgccaacccggacagagggcgaaacttattcttcaggtgatgtcgtctgaggagggtgcacacgtcacttgtttcacagaggatcttcacgatgtaacacttcactttcagatagtgaggttttctaaacagatatacgtgtgggttggatgcaacacagcaaagtttggccatttatatgctgctgcaaccactagaccggataacagagtgagtgttacctctgtactaggaggaacatctgata

SEQ ID NO: 1982 - DNA, 256 bp, Zea mays
  misc_feature: Incyte ID No: 700159858H1
  unsure 187: a, t, c, g, or other
gctacccagcacagcagtcagcagtgtatacaattacattcatgcacacgatggcactcagcactcaggacttgctcgaagctcacgtcgagctctggcaccagtccctgtgctacgccaaatcgctcgcgctcgcagtggcactggacctccgcatccccgacgcgatccaccaccatggcggcangccacccttccccagatcctcgccgagactgcggcccacccaagtaagttcggctctacgccgcctcat

SEQ ID NO: 1983 - DNA, 259 bp, Zea mays
  misc_feature: Incyte ID No: 700159859H1
  unsure 15, 21, 25: a, t, c, g, or other
ctggtctgccaagangagganaggnaggagagagatggcttgccctgcgcagtccatgctctccgccagcggctgcatcttcctgaggagcaagcctcaggcggcatcccaagtgcgagggggcatcatcggcggtggccgcagcagcaggccgttcctgctcacctgcaacgcttcctcttctccgtccccttcctcgccggcgccggcgcaggaagaccccgactgcaacgaggaggagtgcgccccggagaaggag

SEQ ID NO: 1984 - DNA, 259 bp, Zea mays
  misc_feature: Incyte ID No: 700159860H1
gacgctgcagacctcatcgagaagctcatgctggaggcgcctccaaaggtcgtctagatcgatccatcagccttgtgatcggcgacttggcattttatgttaaattgttcatgttacccaatttgttctttattgatggttcaagatgagatttttgtatggatgttgctgaggtataaattagatgctccaaaggctgcatggagcagatgaagacgatgtattccacttcccatttgcatgttgtactaccatagag

SEQ ID NO: 1985 - DNA, 263 bp, Zea mays
  misc_feature: Incyte ID No: 700159863H1
gctcgtcgtcggcagccatggttacggagccattaaaagggctgttcttggaagtgtgagcgactactgtgcccatcacgcgcactgcaccgtgatgatagtaaagaagcccaagcagcacaagcactgatcaatgccgactgatcactacgtgtactgcaaataatttgtactactgcaagttatgtgtgcgtccgtccgtttgtgaataattgggtcatcaaccatcacatcttcggttgcttctacaagtatccgatcca

SEQ ID NO: 1986 - DNA, 264 bp, Zea mays
  misc_feature: Incyte ID No: 700159864H1
ggagtacaacaaggcccgcctcgtgtccctcgagctccccgaccgcagtggcgacataatcatcacaacttatggggagattgacaagaacaattatctggaccccaggactgcgcaagttgctactatagatcatacgaaacagacttgtacgaaactgaggcccgctgaagatgaggagcttccatcggcttacattgaagagtttaggtagactacctgtgcgtctttcctttgacttattccagttaccatattatatca

SEQ ID NO: 1987 - DNA, 253 bp, Zea mays
  misc_feature: Incyte ID No: 700159865H1
gccaaaggtggttgaggcaccagcagaagaggaagcaccaaagccaaagccaaagaatcttcttgacttgctgccaccaagcaagatggtccttgatgactggaagaggctatactcaaacacaaagactaacttccgggaggttgccatcaaaggtttctgggacatgtacgacccagagggctactctttgtggttctgtgactacaagtacaatgatgagaacaccgtctcctttgtgaccctgaacaag

SEQ ID NO: 1988 - DNA, 212 bp, Zea mays
  misc_feature: Incyte ID No: 700159867H1
agcacagctagcgcctgctccccttcgcctgtgatcatgtcttgcagcagcggcaagtgcgactgtggctccagctgctcctgcggcagtcatgcaactgcatgtcccctaacgtggagaccgccgccgccagcagcatcaagaccacggtcctcgccgcgccgaccaccaaggccagcgccggcggcttcgaggcggccacgagggcgggg

SEQ ID NO: 1989 - DNA, 250 bp, Zea mays
  misc_feature: Incyte ID No: 700159868H1
ctggaaagtaccttggtacagctagctttgacaagacttggagattgtgggacatcaatactggcaaggaactgctactccaagaggggcacagcagaagtgtatatggagttagctttcaccctgatggttctttggcagcatcttgtggtcttgatgcatatgctcgagtatgggatctgagatctggaagattgttctttacactcaagggccatgtgaaacctgtcctaggagtcagcttctctcc

SEQ ID NO: 1990 - DNA, 248 bp, Zea mays
  misc_feature: Incyte ID No: 700159869H1
ggttgctagagacagagttagctaggtcgaagttgtaacttgtgcggtatcaggagaagggccatcaatacagccgtacaggagattggattctgcaattttttattccacctcacgaaataagtagtaaaatctttttactgatacgggaaataacggatcatgccatgctccggagtcgatagtttttttcaccagacggggcagtgcttggcgcatgctgaatatatggttctagttataaagaa

SEQ ID NO: 1991 - DNA, 232 bp, Zea mays
  misc_feature: Incyte ID No: 700159872H1
ggcaccatatgcgatgagttatattttattcagttacaaagtgatctgtgtatctagagctaaaacagaagcttccatggtcttttcgtcgtctcgtctgcaattctccatacctgtaaatgttgtccaaacagagtggtgaatagtacttctgtacccagcagcatcagaaaatgttaattttgcctacaacactcttttcgatcagtggatggatgagtaccacccgctc

SEQ ID NO: 1992 - DNA, 83 bp, Zea mays
  misc_feature: Incyte ID No: 700159873H1
  unsure 51: a, t, c, g, or other
ggagggctcgctacagcggcttgccactggagccctcgagcgtcgctcgancgttgcactataggctgagccaggcgcgcccc

SEQ ID NO: 1993 - DNA, 252 bp, Zea mays
  misc_feature: Incyte ID No: 700159874H1
gtgtactgcaactgctcgtcaataattccatcgtccaagttgctgatcgaagggactcgagatcgatcatgcatgtatatggtttatttggagtagaaaactgcatgcagcgggtgtagaggacgagcacgtacgtacgtacaatgcacatgctatcgtacgggtatatatgtatgtattatactaggaaaagatgtccgagtgttgctatcgtacgggtcatgtaaacaatgttaagcttatgtgtctttt

SEQ ID NO: 1994 - DNA, 152 bp, Zea mays
  misc_feature: Incyte ID No: 700159875H1
attttgctttgtgcaacatgaattttaagtgtatggggtattacagtgccttgtcttgtgtgaacctgcttatctcgtgctgaacatcgttatgcatggaagtacttatcttttgttctgctaaaaattaagtgttctgcgtctaaaaaaaa

SEQ ID NO: 1995 - DNA, 129 bp, Zea mays
  misc_feature: Incyte ID No: 700159876H1
ggtgagccgtgcgtccctcgaccagaagctcgccctcgccaagcgttgctcccgagaggcgaccctcgccggagccaaggcggcagggtggcgactatcgcctccgcgatccccaccctggccagcgtg

SEQ ID NO: 1996 - DNA, 255 bp, Zea mays
  misc_feature: Incyte ID No: 700159877H1
cacacgaccacaactggcacgtaagtacacgttgccaggaatgacatgctatgctactagtgtttgcttgaactattatcgattgggtttgtactagtgatgacagtttcatcgattgcgcggtcgatctccatcagagacagagacgatataatcagaataaagtatagcagcgcgtgtgcgcaacagggtaagattaggcgtgtgatttgatttcaaagctgtgcttgtaacgtaatgtaatacggtgtggca

SEQ ID NO: 1997 - DNA, 184 bp, Zea mays
  misc_feature: Incyte ID No: 700159879H1
ctgcagccgactgaggctgaggatcttgcgctgaccgatgcccccacaacagtcgcaggaagcaccggcaacactgcccctgctgcaggccaacaggggtcaggatcatcagccatggccgtggacgatgagccacagccgccacaaccctttgagtacacctcgtgagcgaccgagcgtcacc

SEQ ID NO: 1998 - DNA, 255 bp, Zea mays
  misc_feature: Incyte ID No: 700159880H1
  unsure 40, 199: a, t, c, g, or other
aagatggtggctgacaaaacaggccgtggatgtgtttatnggatggacattcaagaatctgcgacagaaaagaggaagtattctctgtcgcagattcttgaatgtccatcccataaacacatccaagaatctgcgacagagaatacttcctcttttctgaaaatggccgtggatgatgaacatcatgtgtgggtttganctatgaagcttttacctaatttcccctgaagaatgaaatagaaaggagaccttatg

SEQ ID NO: 1999 - DNA, 245 bp, Zea mays
  misc_feature: Incyte ID No: 700159881H1
gttcttatgcgtggccattgggctttgggctggtctcgccatcggcttcaccaccgagtacttcaccagcaacgcctacagcccggtccgggacgtcgctgactcatgcaggacgggcgctgcgaccaacgtcatcttcggcctcgccctcgggtacaagtccgtcatcgtgcccgtcttcgccatcgccgtgtccatctacgtcggcttcacgctggcatccatctacggcatcgggtcgccgg

SEQ ID NO: 2000 - DNA, 243 bp, Zea mays
  misc_feature: Incyte ID No: 700159882H1
  unsure 82, 146, 195, 221, 233: a, t, c, g, or other
cattaatattggcagcaagctaggatcatcagcatctgagcttattattactaaatcgatcggttgccatggcggggatganagtcggcaagctggcgctggctgcggtgctgctgtgcgcggcggcggccatggccacggcgcanaggcctccggcgtgtgcgccacctacaacttctacaacccgcagcagancaactgggacctcaacgccgtgagcncgtactgcggangtgggacgca

SEQ ID NO: 2001 - DNA, 245 bp, Zea mays
  misc_feature: Incyte ID No: 700159883H1
gctttgaagatgttgacaccatcgtggctggtctctttggaggcgctgatctgggcatgacacccacctagacctggtggtactacctcgacctagtcgtacttcaagaaatcaagagcacaacttgtaatcacagatgttgcattgaacaaatgtatagtgcagctacggccttgctagtgctaagtttatgtactctatgtctatatagaacacgtatggtaatcttgtttctggtatgtgat

SEQ ID NO: 2002 - DNA, 245 bp, Zea mays
  misc_feature: Incyte ID No: 700159887H1
  unsure 218: a, t, c, g, or other
gcagaagtgcggaggagcattattcggatgatggatattttggctttgtgaagcagaaggatggtgagcctgttgagaatgaggacgctgagccaaatgtggaggctgtgtaaacattctggagcatcctttttttgcaagcgctccgttcggtttcttctggtgccttcatgacaagtcacacaatgctcgttttgcgtcttcagatcatagcgtantcagcttgaataaaactgtaacatcac

SEQ ID NO: 2003 - DNA, 248 bp, Zea mays
  misc_feature: Incyte ID No: 700159889H1
  unsure 215: a, t, c, g, or other
tcctcgaaatcaatgcttcgttgcaaatctgatctatcaacggcaccatatagcagcaatacgctacctgaggaagaacggaggttctatctctacaatgatcttagagttgtatttcctcaaaggcactcagatgcagatgaaggcgagctgcgagtggagcatgatttccccgccgatcccaagtactttgacataagcaactgatggttgcnctgctgcaccggacaataataatctgtaaatat

SEQ ID NO: 2004 - DNA, 83 bp, Zea mays
  misc_feature: Incyte ID No: 700159891H1
atttcacgtctaagaccgaaaacaagccccctctcgatgtactcgtttcatatcgttctgtggttgattgaatttggcacggt

SEQ ID NO: 2005 - DNA, 250 bp, Zea mays
  misc_feature: Incyte ID No: 700159892H1
tgtgcctctgcacggccatcaaggccaacgtgctggggctcaacctcaacatccccgtcaacctcagcctcgtcctcaacttctgcggcaagggcgtccccacgggcttcaagtgcctttaaccatgcatgcacatcatgtgtgtgcgcacgtacgtagtatccaacaccacgcgatgcgtgagtatgacgaagaatacgcgcgtgcgccatgcttgccggccggggatacggtgtttgtggtaatgctg

SEQ ID NO: 2006 - DNA, 226 bp, Zea mays
  misc_feature: Incyte ID No: 700159894H1
caacgtttatgcatgttgaatgtttcctcgaacgtccaggcaatcacaagttgcttcctcatcgatggtgtcttagctgggatgcatgctaggtgatcgctacggtcacgacaagacttgacggctgtaaggtgaaggtagcctcaactcgatgccaggataactgatactgatttttgagggtgtgcattcagtattaaccagctgcctgatttgagatatgtcc

SEQ ID NO: 2007 - DNA, 253 bp, Zea mays
  misc_feature: Incyte ID No: 700159895H1
ggaactactgttcagattatgtcaaggtcattggaaggaaagctaacagtctgcagctgcatgttccaggaaaagggcaatgatgccactataagtaatgcctcagcagacggcaccatggatgaaagcagaactaggaggactattatcttcagtccaaagatatgcaacaatgtagatcttctggttggaaacataattcatatcttcccaccatggaaggaagttaaaatacaagaagagcatgtgatta

SEQ ID NO: 2008 - DNA, 254 bp, Zea mays
  misc_feature: Incyte ID No: 700159896H1
ttttagaaggtcttggatatgaaaggccttcagtaaaaataccagtctctgttatgatgccagtggctcatgttgtagaatggacttaccagaaatttgccaagtatggaatgaaagttcctcagctgaccccttcaaggatcaggctgctttcatgtaacaggacattcagttgctcaagagcaaaggagcagcttggttatgaacctctcgtgtcccttaaggatggagtgaagagaacagtagagtcgtac

SEQ ID NO: 2009 - DNA, 281 bp, Zea mays
  misc_feature: Incyte ID No: 700159903H1
  unsure 200, 221, 229, 261, 277-278: a, t, c, g, or other
cgggttgctgggtttctcaggtttttgcggttgttatccagttttgactggatcttttcacccatggttattgacataaataatgacttcaacctgatggatgagaaggagatcaatgataactttatgctgagcagaaactcttatgagcgaaacccccatgatatagagcctgcaatgtttcctgctacgtcatatgntaaaacatcctgaagcatggnccaaaccntccaccagcagtccggttcccaaacgggtagntgcttatgctaaaagnntgg

SEQ ID NO: 2010 - DNA, 106 bp, Zea mays
  misc_feature: Incyte ID No: 700159905H1
  unsure 2, 65-66, 71, 79, 81, 83, 88-89, 98, 101-102: a, t, c, g, or other
anataaagtgtgaaataaaagccgcagtggacggcaggaacctgctgattgagggaacaaaaaannaaaanaaaaaaanananaaaannaaaaaaaanaannaaaa

SEQ ID NO: 2011 - DNA, 276 bp, Zea mays
  misc_feature: Incyte ID No: 700159906H1
  unsure 232: a, t, c, g, or other
ccaacaagtgccaacacagatggcccaggccccagggaaaatcacacactcgttttctcttgcaatgcaacattgcatgttgcgagctcgtggccttgtcccttcacagccggatcgagtggacagctgcacctcaacggcacccatgatttctccttgattcacttcctcacctataaatccatcgggcttagcaccaaaactctaccagtaagtccatcggcaagcgaanactccactccactccactccacctgttagaaacaagtagctcaa

SEQ ID NO: 2012 - DNA, 276 bp, Zea mays
  misc_feature: Incyte ID No: 700159908H1
  unsure 244: a, t, c, g, or other
ggctaatattgctatacaaatggcgacctccagaaaaggatgagcgtcctgtcatcaaggatgcaatcccaaaccttttctttgccaaccagataattaacaaagcctgcgcaacccaagctatcgtttcggttctcttgaactctcctggcattacccttagtgatgagcttaaaaagctcaaggaatttgcaaaggatttgccacctgagctcaaaggactggctatagtcaactgcgcaanattcgtatgttaaacaattcgtttgcgaggtc

SEQ ID NO: 2013 - DNA, 275 bp, Zea mays
  misc_feature: Incyte ID No: 700159911H1
  unsure 197-220: a, t, c, g, or other
gaaagttaatggtagtcagacaaatgggaaccatagttcatctgcaggtgtaggccgtggagaaagactaaatgcagctcagaaagaaaggatgcggctgcttgcctcagctgcttttgatcggggcaaaggtgaggacacttttggaatgagagacgaggattggttagtgtacaacaagatgagcaaagacaatnnnnnnnnnnnnnnnnnnnnnnnngaatcggaacttgttcgaatttcatcgaagctccaggagattgatcctacatttg

SEQ ID NO: 2014 - DNA, 273 bp, Zea mays
  misc_feature: Incyte ID No: 700159913H1
agagacacttttcttcaggaagaagttcagtcggagtatccagatgtccctttctgtgctccttcttggtgttggtgttgcaactgtcactgatctgcaactcaatgctgtgggatccatactctccttgctggcaattatcacgacttgcattgctcaaattatgacaaacactatccagaagaagttcaaggtctcatcgacccaactgctctaccagtcttgcccttatcaatcactgaccctgtttctcattggccccttccttgatgg

SEQ ID NO: 2015 - DNA, 271 bp, Zea mays
  misc_feature: Incyte ID No: 700159914H1
atggatgcgaaccaagctcggcagccaaagccatatgcagccaacaaactacctgctaccgttgatagtcgtggtggtcactggtaggatttctgcggtgcaccagaaagccattccaaaccgtttcttaacatgttatcagtatcgattacttctgctgagtgctacattattctgacaaatccagaaatgtagttctgtacagatttgtgttctttttccggatacctgaataccgaaagactgtacaactgtagtttctgattcccac

SEQ ID NO: 2016 - DNA, 272 bp, Zea mays
  misc_feature: Incyte ID No: 700159915H1
ctcctgttcaccccgcgtcgtcttcgctctcacgatccctcggcagtcggcgacggctgggcgaccgccacttccgccttctcttcctactgagcgtctccaggcacgcttctgaattcggagttgccagcattcgctcgaggtgccggaccagatctcaccatcatgcaggctagcgatagattcaacataaactctcagcttgagcatcttcaagccaaatatgttggtacagggcatgctgatttgtctagatttgaatgggctgtaaa

SEQ ID NO: 2017 - DNA, 67 bp, Zea mays
  misc_feature: Incyte ID No: 700159916H1
  unsure 39, 59, 61-63: a, t, c, g, or other
atttactgagacaggcaacaaccaaattatttgtgagcntcaatatgttggtgagctanannnaaaa

SEQ ID NO: 2018 - DNA, 281 bp, Zea mays
  misc_feature: Incyte ID No: 700159918H1
  unsure 73, 75, 77, 83, 89, 95, 97, 101, 103, 106, 198: a, t, c, g, or other
cccgtttcaccgtggggcggccatcgctggcacatttcgctactaccccaacggcagaagctcggagaccaangngnacgtcncgcttnctctcnanctcnangantgggtcgctaagacattgaaggcgcggttcaagttccgtttcgtcggtgacgtggcggacagccgttgatactgggaggactgcatagcttngataatattgacaacaattgggggcgccccgagttaatcaaaaggaaagatttggaagagtcgaagcatctcctagacgattt

SEQ ID NO: 2019 - DNA, 182 bp, Zea mays
  misc_feature: Incyte ID No: 700159920H1
gtggtttgctcttcaagctacttcagagattcctggaaatgttgcaaatgttcagaagctgctgtctcaccctgctttcgacctgaggaatcccaacaaggtgtactcactaatcgggggattctgtggctcacctgtgaacttccacgcgaaagatggttctgggtacaagttcttgggtg

SEQ ID NO: 2020 - DNA, 273 bp, Zea mays
  misc_feature: Incyte ID No: 700159922H1
ctccagaccccaatgatgaagatgctgttgtggcatacaatacagtacttaaccgctatggtattagtaaatctgacatattatccagttccaaagattcttcagggagtgccagctctggtgcaaatgatgataaacatgcagttgaaaggcccttgaagagaagtaaaaagcgcagagtgtcatttagagatcaggctggaggtgaacttacccaagtggttgggatttcagatggtgcagatgttgaaactgaaccgggccctataggtg

SEQ ID NO: 2021 - DNA, 165 bp, Zea mays
  misc_feature: Incyte ID No: 700159923H1
tgaggtgggcatgaaagcaccatttttccctcagtctctttgtatgggttttctgaaatcatgtacatttatattttgtggcaagcggagagattgttgtgtaatttccattgtaccaaacgtccaaacccctcttaccaatagaagtctcttggactgtttgtc

SEQ ID NO: 2022 - DNA, 273 bp, Zea mays
  misc_feature: Incyte ID No: 700159924H1
  unsure 112, 256: a, t, c, g, or other
aggtggtcgagatctcgccggagagcatcgcgcgcatcaaggacgacttcaaggacgcgacggggcagacctgctccaccttcgacgctgtcacggcggtggtgttcaagtnccgcgcgctggcgatggcgctccccgacgacgccgaggtccggctcggcttcgccgccagcacgcggcacctcctccacggcgtgctgccgtcggtggacggctactacggcaattgcgtgtaccccgtgggcatcacccggancagcaaggcgatccgtg

SEQ ID NO: 2023 - DNA, 270 bp, Zea mays
  misc_feature: Incyte ID No: 700159925H1
gcttttcttaggattggtagcagcgtcatcaggccagcttgaccacttgctccaacgtggccttaccagttcagcaggcagagacatctgcggcaaagggggagcgcagaaaccaaaagcttgccagaacgggcatgtcatgaagccactgaatggcctggtgcacgggcactattcagcgactcgctgcaatggcgtcattcccatctagcaggctgttttcgcttgttctttttctttccgttctacctacctgcagggcaaccagga

SEQ ID NO: 2024 - DNA, 271 bp, Zea mays
  misc_feature: Incyte ID No: 700159926H1
gatgtatgatcctttgctgaagaaatggcaccaccaatctgttcctctcaatcatacgaagatagttattccagtggcatccgtgggtggccttgtatgtttattggatctgagccacaggaatttttacatctgcaaccctcttacgcaatcactgaaggagatcccaccaagatcagtccatggttggtcaagagtcgttgtagggatggtgttgaatggaagaagttctagtgatggctacaaagtaatgtggttagatattgatggg

SEQ ID NO: 2025 - DNA, 269 bp, Zea mays
  misc_feature: Incyte ID No: 700159929H1
  unsure 20, 24, 58: a, t, c, g, or other
gggttggtgaatcgacaggngtcntgcagcgtcttgcaaggccttttgttttgttacngccgcgccgcctcgtggcgcgcctcgggctcgcgataattggcgaatttcgacatctggccgatccccggattgaaacaattgcaggggtccagctcgcgatagaactcggccagcgccggcttggcgcgatacaggtggccgacgttgtgctcggccggatattcggcgccgcgcgcgtcgagcaggcgccacatgcggtgctccagatt

SEQ ID NO: 2026 - DNA, 267 bp, Zea mays
  misc_feature: Incyte ID No: 700159930H1
  unsure 22, 33: a, t, c, g, or other
cacatactgagcttcgtgaacngggcggacggngaggagcacgagtggaggaggatcttcctggcggctgggttccgtgactacaagatcacgcacacccgaggcatcccgtccatcatcgaggtcttcccgtgatgatcatggatcgagagtcgatcatatatgcatgtttgtacgtgtttgtgtcataataaatcgatcgatcatgttgtttaccctttttatttcggtatctagttgcatctgtgggcgggctaaaataaatca

SEQ ID NO: 2027 - DNA, 269 bp, Zea mays
  misc_feature: Incyte ID No: 700159931H1
acaatgattacctggaaatctgtcgttgttacaaggctatttatgatatcccagcaataaaggaagatccaaccaagtggataccgattcttaggaagatctgttggtacttggtgctagcacctcatgatcctatgcaatcgagccttctcaatgctacactagaggataaaaacctttcagaaatcccaaatttcaggttattgctgaagcagctggttaccatggaggtcatccagtggacagcattgtgggaattctctaagcac

SEQ ID NO: 2028 - DNA, 274 bp, Zea mays
  misc_feature: Incyte ID No: 700159933H1
attgaaaaaaaaaacaggcaaggaaaatggctccgaccgccgccaaggacagtggctccgccgattcgctggcgcgaggtgcaggcgttcgaggacagcaagctgggtgtgaagggcctggtcgactccggcgtcaagtccatcccggccatgttccaccacccgccggagtccctcaaggatgtcatttctccaccagctctgccctcctccgacgatgcgccggccatcccagtggtggacctgtccgtggcgcggcggaggatctggtggc

SEQ ID NO: 2029 - DNA, 269 bp, Zea mays
  misc_feature: Incyte ID No: 700159934H1
tggatgtgaagctccaggagctcaaagacgccatttctggtggatcaacacagagtatgaaagatgccatggctgctctgaaccaggaggtgatgcagattggccaggcaatgtataaccagcctggtgccagtgctgctgggcctactcctggtgctgaggccggacctacgcctggtaccggaccaacgcagaatgatggggatgtcattgacgcagacttcacagatagcaattgaggggtgattgatgcatggccatgtgttgag

SEQ ID NO: 2030 - DNA, 254 bp, Zea mays
  misc_feature: Incyte ID No: 700159935H1
  unsure 23, 50, 78, 216, 238, 241, 253: a, t, c, g, or other
ggtgggcgagcacggggacagcnccgtggccgtgtggtcgaccgtcagcntcgccgggatgcccgtgctcaagacgcngcgggacagccacagcagcttcggcgaggaggcgctcgagggcatccgccgcgctgtcgtcgacagccctacgaggtcatcggcctcaagggctacacgtcctgggccatcggctactccgtcgccaacctcgtgtcntcgctcctccgcgaccagcgangcntccacccggtcnc

SEQ ID NO: 2031 - DNA, 266 bp, Zea mays
  misc_feature: Incyte ID No: 700159936H1
gtcatcgtgaagattggatcaagatacgactgcgggcacctcatcccagaaggcttccaggtcgtggcgcacggagatggctatgccgtctgggagaaaaactgagccaaatctgtgcctgatccgtccgtccggtccggcacgacgagttttagcggatttgacctgcattttccttagcttattattactccaaatacgggatatatatagcgacaacctgtattcgagattcatccgtaaacaggtgaggtgaggatgaaggg

SEQ ID NO: 2032 - DNA, 264 bp, Zea mays
  misc_feature: Incyte ID No: 700159941H1
  unsure 237: a, t, c, g, or other
gcggcctgctatttggattgtcctgtacacataggagtcctatgtggatacaccttaaagcttcatttggtaaacaactcttgacaagggatgagtccactaaattcattgcctttccttcattccataagctccatgcctgaaccaatggaatcaatttcatagaacattaataagtacctttttgctgcattgcaaaaaaaaaaaaatgccaccattcttacataagctaatagntttgggaaatccgtgatgtggtttaat

SEQ ID NO: 2033 - DNA, 263 bp, Zea mays
  misc_feature: Incyte ID No: 700159942H1
agcaatcagctcatctgtcagcgccacaggtgaccggaaaaccacggccggcgttcctgcttctctacccggtccgaattgctgaccggatcaacccgagaccttgcaggattatcgatctgattgcggcatgatccgcttcatcctgctgcagaaccggcaggggaagactcgactggccaagtattacgtcccgctcgaggactcggaaaagcacaaggttgaatacgaggtacaccggctcgtggtcaatcgggacccta

SEQ ID NO: 2034 - DNA, 263 bp, Zea mays
  misc_feature: Incyte ID No: 700159943H1
gattaaatacagcactcctgtttttcttttccattccacaggaacttcagaagcatggtagtcctggtattgtaatggttttggttggtaataaggctgatctacatgataatcgaagtgtatcctcgcaggatgcgcaggactacgcagagaagaacaatatgtttttcattgagacgtcggccaagacagctgataatataaaccaactgtttgaggaaattgcaaagaggttgcctaggccaacggcatcgtgacagaac

SEQ ID NO: 2035 - DNA, 197 bp, Zea mays
  misc_feature: Incyte ID No: 700159944H1
cttcaaataatgttgtttggtttagggtcaaaggttgagataggattatctcagtgttgttccagttatccctcaaaattggaggaacgagagatgacgccacagaacgtcctgtctcgcaaccaaacgcaccattagcttctcaatccccttctaaacagctcaatgtatggtttgccccatttatgtgaagagaa

SEQ ID NO: 2036 - DNA, 262 bp, Zea mays
  misc_feature: Incyte ID No: 700159945H1
cgagaagcagatcctgagatccggcaccggccccaagccgataaagggccagaaggtcaccgttcactgcaccggctacgggaaggatcgtgatctgtccaagaaattttggagcaccaaggaccctgggcagcagccattcagtttcagcattggtcagggttcagtgatcaaaggatgggacgagggagttatgaccatgcaagtgggtgaagttgctcgtatccagtgcacgcctgattatgcttatggagccggcggg

SEQ ID NO: 2037 - DNA, 263 bp, Zea mays
  misc_feature: Incyte ID No: 700159947H1
  unsure 63-86: a, t, c, g, or other
cacaaacgcaagccccaatctcgccgtcaccacccccaatccagcaaacgcaaacccgatatnnnnnnnnnnnnnnnnnnnnnnnngatgtctcgccgctatgacagccgcacgacgatcttctcgccggaggggcgtctctaccaggtggagtacgcgatggaagcgatcggcaacgccgggtcagccctcgggatcctagcggccgacggcgtggtcctcgtcggcgagaagaaggtgacctccaagctcctccagacctc

SEQ ID NO: 2038 - DNA, 253 bp, Zea mays
  misc_feature: Incyte ID No: 700159950H1
gtggaagcatcgagttcttattagaactgagtactcgctaaaaatggctctttaggggacctgttatgcttcccctgaaagaagagagggttaaacttgtcactagtactatgaatatcaaaaaacaagagtaaagatggttggagcatcaaaatggtaatactcaacatcaaattttgtgtcactcaaacatgtttgcatggattacttttgtagggtagtcagatgtctgcgtcaattttgtcaatacctg

SEQ ID NO: 2039 - DNA, 251 bp, Zea mays
  misc_feature: Incyte ID No: 700159951H1
cgagattccttaaccagcgcgagccaatatactgttgcgtgttctcctgcaaatgagatgttctgcacctatgcttgtaatgttgtatttctgggtttttaagctatccaacttggagatacaaccggtgaggaagcagcaacaataggtagttctacttctgagtgaggaaaaacaacttgcggctgagttaatgaagcttagtagctaccaccgttgtatgacagttgctcagagatgttatcttcatt

SEQ ID NO: 2040 - DNA, 217 bp, Zea mays
  misc_feature: Incyte ID No: 700159955H1
  unsure 206: a, t, c, g, or other
agcacagctagcgcctgctccccttcgcctgtgatcatgtcttgcagcagcggcaagtgcgactgtggctccagctgctcctgcggcagtcatgcaactgcatgtcccctaacgtggagaccgccgccgccagcagcatcaagaccacggtcctcgccgcgccgaccaccaaggccagcgccggcggcttcgaggcggccaccganggcggcggctg

SEQ ID NO: 2041 - DNA, 260 bp, Zea mays
  misc_feature: Incyte ID No: 700159958H1
atccatcctcgctacaagacgagaagaagcttgtagagtctattaaattcgctaatgcgtgtggagcaatcaccgccacgaagaagggtgcgatcccgtctttgcccactgaaactgaggtcttgcagctaatagagaaggcatagatagatcactgtaattgctttggttttcactagcttccacttctgcaaattgcaaaatgtattgtattctgatctggaacagaagaagtgggtgctccatcttacctgccattt

SEQ ID NO: 2042 - DNA, 255 bp, Zea mays
  misc_feature: Incyte ID No: 700159960H1
gtcgctccgccgccgccgaaacagcacatcgctctctcgatctcagccatggcggaggtggagcagccccaggacgcggtgaagctcttcaaccgctggaccttcgacgatgtccaggtgaacgatatctcgctgaacgactacctggctgtgactgcggcgaacacgcgacattcctgccgcactccgcggggcgctactccaagaagcggttccgcaaggcgcagtgcgcatcgtcgagcgcctcaccaatcg

SEQ ID NO: 2043 - DNA, 257 bp, Zea mays
  misc_feature: Incyte ID No: 700159961H1
  unsure 232: a, t, c, g, or other
gacggcgaccgtgacggccagaggagggagcgggggcagtaaggttgctggaggggacggtggcatcggcaagccggggctggcgaggatgttgacggtgtccaaggggccgaccaagttccttgatgcgcacgggctgcagcagtggtgggctgacgatgtggagctgcaggtcgccctcaaccacagcaaactcatcgaccgccagctcaggtcgctctatgccgcgcancggcctcgccgcaagtgaaccagta

SEQ ID NO: 2044 - DNA, 245 bp, Zea mays
  misc_feature: Incyte ID No: 700159966H1
ctcgcgccgccaccaaatctccagcgagcgaagaggcggctccggcgagtgcgcggcaaggacgaaggcgtcggggccagtggcgagaggaagagcatgctgaagttcctgtccaaggtggtggtggagtactgccctctggacccgcggaaggcggcggcagtggagctcctcgcgcagtgcaacgtccgcaagcaaggactccaacccggcttgctcggtcgagtccgccgcctcccctcccc

SEQ ID NO: 2045 - DNA, 246 bp, Zea mays
  misc_feature: Incyte ID No: 700159967H1
ggatgagatcgtcccggtcccaacaaagatcgttgatcctaaaactggagaggagaaggaagttgtgatatcagttgatgatgggattaggccagggaccacagcatctggattggcgaaactgaaaccagtttttaaaaaggatggaactacaactgcaggcaattccagtcaagtgagtgatggtgctggagctgttcttctcatgaaaagatctgtggctctgaagaaagggctgcccattct

SEQ ID NO: 2046 - DNA, 201 bp, Zea mays
  misc_feature: Incyte ID No: 700159968H1
ctccatctccgtgttgatttacagctagaataatgaccagttcagagtgaatgtgtgagcgtgtgtgttcaagtgtcagtgagtgaacctggcgttgtattttgaccgtgtgagtccgtgtcgtattttcagttgtctggtgtgttgtgtgtgtgagtatctctgaataagaatgtaatgctatatgtgtgccatgttaat

SEQ ID NO: 2047 - DNA, 151 bp, Zea mays
  misc_feature: Incyte ID No: 700159969H1
  unsure 131: a, t, c, g, or other
tatattgtatatcctgctggattaacaaatactagcaaccacttatagtcagtcaacataggccatctactgccagtacctcttttcttctcatgagttgtagcagtttctgtttaattcatatgattgtnattacaatcatattttaagt

SEQ ID NO: 2048 - DNA, 220 bp, Zea mays
  misc_feature: Incyte ID No: 700159970H1
agcgcattcgcgtacgtcaacggacgtcgaacccatcgcccatgggaggagggcacgaggagcaggagggtggcggcgcaaaggccgggggctactcctccggtctcccgccgtcggagccgccgcacctgcagggccagccgccgcaggagtacgggtacggcacgttccagggccctcggcatcctcccgtcgggttcccgcagcctgccccgcctcc

SEQ ID NO: 2049 - DNA, 251 bp, Zea mays
  misc_feature: Incyte ID No: 700159971H1
cgaccactgatggtgttttattgtactcagttgatgaatcatttatttttgatccaacggacctcgacatcgacgttacgcctgagaaagtagaggaagctcttgcagaaaaccaacaacaaagagcccttatacttagccttcggttaaatgaggatttattgattaagaagtgcatattcgcagttgatccagccgatgtgagagcaatttgttcggcaattccttacaagtatctccaaagattgatt

SEQ ID NO: 2050 - DNA, 252 bp, Zea mays
  misc_feature: Incyte ID No: 700159972H1
  unsure 173-194: a, t, c, g, or other
ggagactaggacgaccgggccttgtatttatctgcccggccggatgcagtgcatgtacctggccgccgcctcctcgatcaccatcacccccgcgcttcttccttctctcagctcgtctcctcccctgcagtgtcctgcgctgatgaccatagtagatagatcacttcgtagcnnnnnnnnnnnnnnnnnnnnnnaaaacagcttcttctcctgaaacagctagctagctagttccgacttgctgttgctgtt

SEQ ID NO: 2051 - DNA, 253 bp, Zea mays
  misc_feature: Incyte ID No: 700159974H1
cgccgaggaaggtcgacatgtcgtctccgccgccgccggtgaagctgatcggcttcttcggcagcccgtacgcgttccgcgcggaggcggcgctgtgcctgaaagcgtgccgtacgagctgatcctggaggacctgttcggcagcaagagcgagctcctgctccaccacaaccccgtgcacaagaaggtgcccgtgctcctccacggcgacggcagggccatctccgagtccctcgtcatcgccgagtacgtc

SEQ ID NO: 2052 - DNA, 253 bp, Zea mays
  misc_feature: Incyte ID No: 700159975H1
atatttgtttcttcatgggttggttcaaccatcttctgggtgggtgagtggtttataaagaaaatgccatttgtaagacatatatattcagcatcaaagcaagtcagcactgcaatttcaccagatcaaaatacgactgctttcaaagaagttgcaataattcgtcatccacgaattggtgaatatgcatttggattcataacatcaacggtggtccttcagactgacaaaggcgatgaagaactgtgtagtg

SEQ ID NO: 2053 - DNA, 254 bp, Zea mays
  misc_feature: Incyte ID No: 700159977H1
aaagggccacctgaatcaagaggctgggcttgtgccaagcttgaatcctcttgtgaaggagtttctcaatgctgctgatgacaagcggaaggaagtcctctctaaaatagaagaggatgttgctaagctcagcggttctgcagccaagcatggaaagatatatgtgacagctgcaaagaagatcatagacaagggctctgactacactaagaaggagactgagaggcttcaccgcatgctggagaagtcaatca

SEQ ID NO: 2054 - DNA, 110 bp, Zea mays
  misc_feature: Incyte ID No: 700159979H1
gtttagttgagttggggggaacaaaattggcgagactattttgctgcattctgctctgctgtttttagttactgatgaagaataaaacgatggtggtgatcagttttatg

SEQ ID NO: 2055 - DNA, 244 bp, Zea mays
  misc_feature: Incyte ID No: 700159981H1
gtcgatcatgaagggtggcaagaaggaagtggccggtgcggtggtggccatactgctggttctgcagctcatggcagctccaccgacggccatggccgcccgctcgccgcgcggagccgtgccggatggctccctcgccacgacgcccaaggtgacgatgctgtcggccacgctgtgctacacgggggagacatgcaaatacattggctgcctcactcctgcttgctcctgcaactatagtgat

SEQ ID NO: 2056 - DNA, 243 bp, Zea mays
  misc_feature: Incyte ID No: 700159982H1
ggtgtaaagggcgacaacagttgggaatcttggtgggatgaggagcaggcgcatatccagacattcagaggacgtattcttgagacaatcctcagccttagatttctcatgtttcagtatggcattgtgtacaagcttaaaattacagatcataatacttctcttgcagtttacggcttctcatggattgtactctttgttatggttcttcttttcaagctttttactgcaactcctaggaag

SEQ ID NO: 2057 - DNA, 245 bp, Zea mays
  misc_feature: Incyte ID No: 700159984H1
  unsure 27, 32: a, t, c, g, or other
gtatactcgcagtgcagacaccgtaanggttncatgttgcaacacagtgaaccttgttagaccagtgaataatatagctcatgtgaactgcggccagtgccggacaactttgatgtatccatacggcgcaccttcagtaaaatgtgccgtatgcaattatgtcacagctactggagtaaatactgtggcacccaccccatctgcgaggccaacatcagatgggtcttcatatagtggctcatcta

SEQ ID NO: 2058 - DNA, 232 bp, Zea mays
  misc_feature: Incyte ID No: 700159985H1
aagaatgataattggccgtgagctcttcaaagaggactgaaacttctattttgcaagccagatatcagagcatattgttagctggaggaggtgagggcgatttagatatttagcaaatcacccctgtggttcaatgcttttgtataaccgcagacatacatcaaataaagttcacttgtacttgctgcttgcagtggctctatttttctgtcaataaagttttttatgtctc

SEQ ID NO: 2059 - DNA, 246 bp, Zea mays
  misc_feature: Incyte ID No: 700159986H1
atcaaatgtcccattacaggcaaaacgttcatccaagaaacccgcagcacgggcaaaggttccttttgagaaaggctatagtcaaatggattggctaaaactgacacaaacacatcctgatctagctgggcttaaggggcagtcaaaccgaagttaatttctttggaagaggttaagcagcacaaagcaggagattgtatttggacagttctcaaaggccgcgtgtacaacattgctccatacatg

SEQ ID NO: 2060 - DNA, 248 bp, Zea mays
  misc_feature: Incyte ID No: 700159987H1
attgagggtgatacagaagggggggctgatggtgggaataaaagctccaaatatatcaatgatatcgtaataaaaccacttgaccgtcacaatcttctacgcccagagactgtggaatcactatttgttttgtatagaatcacagaggattccaagtatagggagtggggttggcagatctttcaggcttttgagaagtacacaaaagttgattctggtggttacacatcattggatgatgtcacaag

SEQ ID NO: 2061 - DNA, 250 bp, Zea mays
  misc_feature: Incyte ID No: 700159988H1
cttaaagcagcatcggctactaccaccgactcttgctcacacagctcgttctctgcagctgccgcacatagctagtgaacgaccatggcgtcccaggccatcgagagccaccgtgccggtgctgaggtcgtcaccggaggagacgccgtctgcaggaagaagtcaatcgagctgctggaggagctcggcctccccaagggcttcctgccccttgaggacatccaggagttcgggtacaaccgcgtgacag

SEQ ID NO: 2062 - DNA, 249 bp, Zea mays
  misc_feature: Incyte ID No: 700159989H1
gttcgaagtgcttgattaccacctcctgaccctgatatcccatgtactgattggtgtgcttgccaccttattcctgtggtccaaagcaaccacgttcatcaagaagagtccaccggatattccagtagtgcaggtatctgaggaccttgttgtgaatgtttcacgggcattacggaatgacatcaacagagcgcttcacttgttccgtgagatcgcaatggggcatgatctgaagaagtttttgggtgt

SEQ ID NO: 2063 - DNA, 248 bp, Zea mays
  misc_feature: Incyte ID No: 700159990H1
atgcaattcaaggcagggattgtcatgcatgaagtccgcagagggttccatttgaaggagaggctgctaaggcctgctactgtgaaggtctctactggctctggcaaacaaagtgcaagctcataggcgggggacaaagatgctgctttgtgaatctgatcaaacgaccaacaggaactgatagacacacatttttctgttcataacatgccgaatgtgtttgatctcaaatgagacgggatcagcta

SEQ ID NO: 2064 - DNA, 237 bp, Zea mays
  misc_feature: Incyte ID No: 700159991H1
  unsure 79, 217: a, t, c, g, or other
accaccggcccgtgccccagccacaacaaggcgaaatcaggggtggtcacgccgagcgactacgcgaagacgcagtcgncgggggcgaagatctcccaacccacattgcgcgcgcgtctacgcccgaggatcgatggttggcggcggggcgcgccggcggcgctggggcgctggtgcctggtgatcctggccgtggcctccgcgctaggggtctctngccccgccttctactggcgc

SEQ ID NO: 2065 - DNA, 248 bp, Zea mays
  misc_feature: Incyte ID No: 700159992H1
  unsure 6, 16, 138: a, t, c, g, or other
ctcganggcagcgaanccgagccttcccttccctccaatcgatcacccgcttcgatccgctagctagctagcagcgcgatggcttccctcaccgtgtccacgaagaccgcggcggccggcggcaacaagcagcgcganggcgcggaggtcatcacgggcgcggaggcctgcttcgcgcactccaagcagatgctccaggcgctgggcttcccgggcggcgtgatgccgtgcgggggctggaggagtgc

SEQ ID NO: 2066 - DNA, 121 bp, Zea mays
  misc_feature: Incyte ID No: 700159993H1
ctataacacccttagaaggtggagacccggtgttgtgatacttaatataagtagaaaaaacgtaattctgttactttattctcctgatatttatgagcatcgtttaagcactcgtgtggtg

SEQ ID NO: 2067 - DNA, 250 bp, Zea mays
  misc_feature: Incyte ID No: 700159994H1
ggcggattctgctttgacttgtcgtgaacttgtagcagtagtgccatgtactacgcgatacgaatggcaatagaattggatgatggttccttttctttaacgctctccggattcattcagaggtcagtcagatcgtcgagagtttcagccttttttctcatgtcttgatctgatttgtatcttgctatcattctgtatgtactttgtacaccagaaaacatctaaaagggagatgttgacgaactaacac

SEQ ID NO: 2068 - DNA, 252 bp, Zea mays
  misc_feature: Incyte ID No: 700159995H1
cgcttatggcggttatcccaattaccaacagcaaccagctgcacagcagcaacagcaacaacagtgatgcctgtttgctcgggtaggtcattgggttgtcgcgacggaattaattaaatattatttcaggacactctcatattgcattcttgtcaattgaggtggttttgaaaggctcctgattttgatggccccatggcacggtttcatctatttattagtatatgacatatatgcgctgtgaacaagtgg

SEQ ID NO: 2069 - DNA, 255 bp, Zea mays
  misc_feature: Incyte ID No: 700159996H1
  unsure 116-141: a, t, c, g, or other
atcaaggacataagggacgttaaagagcttcaagatgttgagacattccgacaatgcttaattgatgaggatttgctgccaccacagcacgacgactaccgcggcgagtatcctcnnnnnnnnnnnnnnnnnnnnnnnnnnttccggcctccgtctcccgccccgtcctacacggagaaggacgtgctctcgtcgatgctgagacggctcggtgagctggagggcagggtgcaggtgctcgagacgaagccgtcc

SEQ ID NO: 2070 - DNA, 279 bp, Zea mays
  misc_feature: Incyte ID No: 700160001H1
agcaaccagcagtaacacaggtgcagagcagccaaaaccaggctgcggaaaccagtagctctgctgctgatacggctacagaagtaactcaggaatcttctggtgctagctaacatcttttatgccgaaatgggctaatgcttgcaggttgtgtaccatatgtctcttgagggtctaagatgtgtttttctgtgtgatgcgtctcatggacgggtgttagctgctgcatctggacgcctaaatgagaactaagttattagttgctgggggtaattctaa

SEQ ID NO: 2071 - DNA, 272 bp, Zea mays
  misc_feature: Incyte ID No: 700160004H1
aactgatggtattattgagcctgtggaccttgcaaagaacaatgagaatgcaccccaagaataccaagctgcatttgaaattatccctgataaagttgcagagggtaatgatgtgtcttccacaggaattactaaggatactactggccatagtgcagatggtaaagctctcacttcagaaccgcatataggggaaacacatgtcaactcagcttcagaatccataccaaatgacgcagctcccccaacccagagcaaaatgaatgggtcga

SEQ ID NO: 2072 - DNA, 268 bp, Zea mays
  misc_feature: Incyte ID No: 700160006H1
  unsure 158: a, t, c, g, or other
cttctgtcttattgccacatctccacgtctccaccaaacaaggcaacaagggagaagtagatctgcatctgcgagagaaggcagcgggggtggtgatgatggagagccagccgctgcaggccccgacggccacggctccggcccccggatctgcgganccagccggagctccgccggccgtcacccccggcaaggagttcacgcgcacctgcaaggcctcgtcgtcgtgctcatcggaggatacgtgctgctccagtcctcccttcgt

SEQ ID NO: 2073 - DNA, 182 bp, Zea mays
  misc_feature: Incyte ID No: 700160007H1
  unsure 121, 123, 132, 139, 145, 147, 153, 156, 163, 166, 173-175, 181: a, t, c, g, or other
tccacatcgtatcgcgtcgttctgcttgtactctgcttcttcctctatgtattaataatcccagcagcttgaaataataacaatgcatgcatgcatccatgatggaaattagaaataaaananaaaaaaaanaaaaaanaaaaananaaaaanaanaaaaaanaanccaaaannnaacaang

SEQ ID NO: 2074 - DNA, 265 bp, Zea mays
  misc_feature: Incyte ID No: 700160009H1
gctgcgataaaaaaagagcaacttaagatggttccaattgcacagttgtctgcggggaagagagtttcaatagcagggcattcaggaaagctctggaggtggaaaagaagccatcaccagtggctgatgcagttcaagtggaagtggcagaagccgtggaagttgtctgaggtgatacgacacagtgatgaaacaatcacgaggattaggcccagacctccacttcttccacataaacctcataactgatgtgaaacggacttgt

SEQ ID NO: 2075 - DNA, 263 bp, Zea mays
  misc_feature: Incyte ID No: 700160011H1
actgataacacgatttttgcaatgccagaaacagctctaggcctctttccagatgtaggggcctcttattttctatctcggctaccagggttctatggagaatatgttggtctaactggtgccagattggatggtgcggaaatgcttgcctgtggcctggcaactcattttgtcccgtcaaagaggttgccattgcttgaggaatcgcttaaaaagctggacacgtccagtacttttgctgtgtcgggtattatcgaccagtt

SEQ ID NO: 2076 - DNA, 188 bp, Zea mays
  misc_feature: Incyte ID No: 700160012H1
  unsure 46: a, t, c, g, or other
ccgaatcccaagctttctcctctccgtgcaggtgcagcagccagcncgcgcgtctctacaggaaacagagagcatccgagtcccaaagctcgcagctttgccagcaaagcaagaagacagttgcggcatggagctggagcttgggctggcgccgccgagcgcgcgccgtcccacccccatgacgatcg

SEQ ID NO: 2077 - DNA, 266 bp, Zea mays
  misc_feature: Incyte ID No: 700160016H1
gattgttccatcagaggtgactataaagctgttgcaggaggcaatgataaaaaatgaaaatgacaaattcctgatcgacggatttccaaggaatgaggagaatcgtgcagcatttgagaatgttaccaaaatttctcctgcatttgtgctattctttgactgttctgagaaagagatggagaaacgtctcttgggacgcaatcagggaagagttgatgataacattgaaactatcaaaaaaaggttcaaaacctttgttgagtcaa

SEQ ID NO: 2078 - DNA, 272 bp, Zea mays
  misc_feature: Incyte ID No: 700160017H1
atggtgtcgatctattctacacccagcttgccccgtcaagaacctatgattccctaaccgacgaattcagctatgcgctgcttctaatcacgatcgcagtcctggttgccgccattattggtacatggatttggtctgagaaaaaggagttgagagacaagtggaggtgagcaaggtctcagtgttctgacgctgaggaaattttgggccctagtcagctaccttctcctcctctccccttttcattgtagtgctagagtccgttcactttt

SEQ ID NO: 2079 - DNA, 266 bp, Zea mays
  misc_feature: Incyte ID No: 700160019H1
caaaacaacttattgagaggcttgtatttgctgaaggtgcagaaaatggccttgatttcacaatcgtgagacctttcaattggattggaccaaggatggacttcattcctggtgttgatggtcctagtgaaggtgtgcctcgggttttggcttgcttcagtaacaatctgctccggagagagcccttgaagcttgttgatgggggtcagtctcagagaacctttgtctacatcaaggatgccatcgaagctgtagtgctgatgatt

SEQ ID NO: 2080 - DNA, 266 bp, Zea mays
  misc_feature: Incyte ID No: 700160020H1
  unsure 33: a, t, c, g, or other
ctgctgcgagatggaggcccgggctcaccagangatggaggaggtggccatggagcagctgccgtcctaggcacaagatggattgccccggccggcagcccatgcaatcgcattgcatctatctcatcgatctacttacgtgtctacaccacatgcgtgataataatctgcagattgacctggctactagctggtatattgtcaccgtgattatattaagtttttgtttaacaaaagggtagaagtcgaagtccgagccggcaaaa

SEQ ID NO: 2081 - DNA, 262 bp, Zea mays
  misc_feature: Incyte ID No: 700160021H1
  unsure 56: a, t, c, g, or other
ggtcggtctggattggctttaggtttgagcagacactttcctttttatggagcgangagctggttgtgactcttcctcttcttttttcattttttttacttttttcctttctcactttatcttcctaatgtgggttgtactttggtctttgatatatgtataaccgacatgcgcatgtaccttcatttttatatagctttagacctttttagcatgtgccacattttcagtttctagagatttcacatgttctccagagggg

SEQ ID NO: 2082 - DNA, 260 bp, Zea mays
  misc_feature: Incyte ID No: 700160024H1
  unsure 55, 131, 201, 244: a, t, c, g, or other
ggccgattctctgcgtgacttggggcgtcgtcgccgagttttctccggccgaggncggcgcgaccggacaaccagcgtgaggcgaccggcgacatgactcgcggcaaccagcgtgaccgcgaccgtgagcncgcggcggcgcggaaagcccaacgccaagaactcccaggacgggctcaccccggagcagcgccgcgaganggacaagaaagctctggaggagaaggcggccaagaaggcgcanaggcagcggccggcgg

SEQ ID NO: 2083 - DNA, 258 bp, Zea mays
  misc_feature: Incyte ID No: 700160026H1
ctgatggaacatgtgaagcagagttcttttgttttgatagcatagccagaaaaatagtaggaaaaccttgtgacaaccttgttacagcagttacaacttctcaaggtcccccggtagacctagccactgttatgtgactgaaatttaccctttgcagttgccatcaatatgtcagcctactctgtcacaaacagtcttctctattctgtctattttaacaaatcatgtaagacatgccttcatgccatctaacatgcc

SEQ ID NO: 2084 - DNA, 205 bp, Zea mays
  misc_feature: Incyte ID No: 700160028H1
gcttagggcagatgctagagatcgggttgctgctacagaaagcactaggtgctctgctgattgactgcagcgtttgcgctgttattatgatatgttttcttggattctgagggagcctgggtagaagtctcacagaaacctttgtaattttttttgtctcatgctctggactgttattccattttgtaacatctcattttggctg

SEQ ID NO: 2085 - DNA, 259 bp, Zea mays
  misc_feature: Incyte ID No: 700160029H1
gcaagaaggcaagcaccaatcagccagcagtccagcacaatatcatgaacaagcgtcaggtcgccgcggcggtggctgccctcctggcgctgctagccgcatcatcgacggccggcgccgtgacgttcgacgcgacgaacacggcgtccgatacccccggcgggcagcggttcgaccaggccgtcggcctcgactacgccaagcaggtcctggccgacgcgtccacgttcatctggaacaccttcgaccagcccagccc

SEQ ID NO: 2086 - DNA, 260 bp, Zea mays
  misc_feature: Incyte ID No: 700160030H1
  unsure 199: a, t, c, g, or other
ctgcggcagcggatgcaacggctgcggtatgtaccctgacgtggagaccgccgccaccagcagcgtcaagaccacggtcctcgccgcgccgaccaccaaggccagcgccggcggcttcgaggcggccaccgagggcggcggctgcgactgcaacacctgcaagtgcggcaccagctgcggctgctcctgctgcagctgnaactgagctggcccggcccggcgatggcgcacgagagtcgagaggaggaggacgacgacga

SEQ ID NO: 2087 - DNA, 260 bp, Zea mays
  misc_feature: Incyte ID No: 700160031H1
  unsure 247: a, t, c, g, or other
ccgagcccgttcgtgatccgcgtcctgatcgccctgaagctgaagggcgtcgagttcgagttcgtggaggaggtggtgggcaggaagagcgagctgctgctgaggtcgaacccggtgcacaagaagatccccgtcctgctccaccacggcaagcccatctccgagtctctgatcatcgtccagtacatcgacgaggtctggtcctccggcgcgccggccttcctccccgccgacgctcacgcccgcnccgtccagcggtt

SEQ ID NO: 2088 - DNA, 262 bp, Zea mays
  misc_feature: Incyte ID No: 700160032H1
agacaattgatggatcataccactctatggctgtgtgaagatctcacttggtccctggatagggatggtatcttgcaagtaatatttaatatggaggcgtaattgtgtttaatagtcggcatgccttagtaacatgtagaaccttctgcataaagcttgaccaaggacagcgggatgctagagaaggacctgtgaacggagaacgtggtgtgtgttttgtcttgtacgggtgcagaaacattgatgttttcaaataagtgtg

SEQ ID NO: 2089 - DNA, 258 bp, Zea mays
  misc_feature: Incyte ID No: 700160035H1
gctagccaatgaagaggtaaattcgtcaggcttgtatcaagttagtagttcatggtgcctggatgagcagtagagatgctactggccgtggaaggaggagggttcttttcgtcttcagcttcggggtacagccatggccttgctctcttgctactcggacggaaagctgaggagaagcccgtcaaggcttcgccgtggaaccagtaccggctagtcgaccgggaggccgagcaggtgtaccacctgccctccgccaag

SEQ ID NO: 2090 - DNA, 256 bp, Zea mays
  misc_feature: Incyte ID No: 700160036H1
agagcgtgagattcaaagaactatgttggagctgctgaatcagctagatggttttgactcgcgtggagatgttaaagttattctagcaacaaaccgcattgaaagtcttgatcctgctttgcttcggccaggccgtatagaccggaagattgaattccctctcccagatattaaaactagaagacgcatcttccagattcacacatcaaaaatgacattagctgacgatgtgaacttggaagagtttgttatgacc

SEQ ID NO: 2091 - DNA, 256 bp, Zea mays
  misc_feature: Incyte ID No: 700160037H1
  unsure 238, 243, 251, 253-254: a, t, c, g, or other
catttagccggttacaaaaacagccagctgagaatctgtcatactcagccgaaaaaagtgttgtctggtagctaacttgtacggataaaaaataatcacgctgtgtgctgtacgcaattctcatcagataaagcgaaacattgttttcctgggaattatagttttgctgaaggtgaccagttgaacacttgaacatggtgatgcttttcccctctatgtgcaacttggttcaagagcnaaaanaaaaaaananngg

SEQ ID NO: 2092 - DNA, 80 bp, Zea mays
  misc_feature: Incyte ID No: 700160039H1
  unsure 64-66, 70, 72, 79: a, t, c, g, or other
ggaggctgcattggcaattcagatgggtaatggccaacttattggcgggaggcagataaagtgnnncctngnggagagnc

SEQ ID NO: 2093 - DNA, 163 bp, Zea mays
  misc_feature: Incyte ID No: 700160041H1
gcttggagtcaatgtgaatgcttaatttcgaatttttattgtttacacatgtcaatctaggtttaccaatctgtttccttgtattatattgtgcggtaaattgccccacagctgaggacgattgctttgctcggtgtcatgtttgagaaaatttcttatttgg

SEQ ID NO: 2094 - DNA, 249 bp, Zea mays
  misc_feature: Incyte ID No: 700160042H1
aaaaccaaatggatttctcagcctaaggagccatatctggacagataccgataacaaccgtgcagggatgctcccttttgtctttgacaactcatttgggtttgagcaatatgtggattatgcattagatgtccccatgtattttgtgtaccgaaataataagtatattgactgcaccggaatgtcatttcgggtctatttctgtccttgatgtccttttacttctgtagttctgtattgtaaaggttt

SEQ ID NO: 2095 - DNA, 143 bp, Zea mays
  misc_feature: Incyte ID No: 700160043H1
  unsure 116: a, t, c, g, or other
aacctgtgctattgtaatgtgtcacatgcttatatttgcaataaacagctctaggtggtcagctttgtctgccgcaatgagcagtgtatcgatattgtggttttgaattgtttggntctaaataaagtcttgtgttcgataaa

SEQ ID NO: 2096 - DNA, 252 bp, Zea mays
  misc_feature: Incyte ID No: 700160045H1
tgcagattaatcgtctcgaagcttccgatacactcagttctcacatgaacgagtgggatggacctccctagaaaccaaacacccctgaatcgcagtcatcatcagagaacgacaatccgtgtgctgttgcgatgtagtagtactactgaagcacagagcgaaccgcacaggctagcccgcacggagcgaaccacacgggaaaagctgatgggaagaaacagaaaagtcaagaaaaggcagttcctgcagctt

SEQ ID NO: 2097 - DNA, 161 bp, Zea mays
  misc_feature: Incyte ID No: 700160046H1
cgtttgttttcatccttcttttttcagttttttaagatgatgcttttagttttgctatatcctcgtcttttccttttttttttcgtaccctatttttccgtaccgagaagaatgttgacatgcatatatgcatttcatgctgagtttgaagttctataagc

SEQ ID NO: 2098 - DNA, 252 bp, Zea mays
  misc_feature: Incyte ID No: 700160047H1
gcgcgacgaaggtaagatgttcctgcggaggatcctgaccggcgggggcggcctggcggccctgagggcggcgcgcgccgtgaaggagacgacggggatcgtgggccttgaggtggtgcctaacgcgcgagaggttctggtagggctctacgagcgcacgctcaaagagatcaaggccgtccccgaagacgagggttaccgcaaggccgttgaatccttcaccggtcaccgcctccagatctgccaggagga

SEQ ID NO: 2099 - DNA, 243 bp, Zea mays
  misc_feature: Incyte ID No: 700160052H1
  unsure 202, 208, 230, 236: a, t, c, g, or other
gaagtgagtacagcaatttagcagttcttaattttccatgcttattgcttggttttaacattatgatgattattaacgttgcgcatacggtgccagatttgagacatagtaatgacccgagccttggaaacaagaggggtaacaatggtgggagacttgcaagccattcaacggttgcaaggcagatccacctcgctcttancctggngtcgtcgaaagggtccaccccnggggtnaaaatgg

SEQ ID NO: 2100 - DNA, 188 bp, Zea mays
  misc_feature: Incyte ID No: 700160055H1
  unsure 157, 162, 165-166, 173, 176, 179, 182, 184: a, t, c, g, or other
cacagcaccatcaaggaatacgggaaactatcgttcacctggttcggcccaacaccaagggtgatgattcctgacccagagttagtcaaagaggtgctgtctaataagtttggccactttggcaaaccaaggagtagccgcattgggaggttgctanccaanggnnttgaaanccnganggngnaaaa

SEQ ID NO: 2101 - DNA, 87 bp, Zea mays
  misc_feature: Incyte ID No: 700160057H1
  unsure 5, 26, 39, 81-83, 85: a, t, c, g, or other
ccaanaatggagctccatttaaccgngaacacttacggntcaccttgctatcaacatcagatgagtaagcacaaacaaatnnntnct

SEQ ID NO: 2102 - DNA, 245 bp, Zea mays
  misc_feature: Incyte ID No: 700160058H1
  unsure 37, 39, 55-56, 78, 81, 139, 151, 157, 166, 172, 174, 179, 190, 199, 202,214, 244: a, t, c, g, or other
ggagaagctccacatggggggcgaccacaagaataangnggaggagcaccacaannaggccgaggagcaccacaaganggnggagggggagcaccacaagaaggacggcggggagcacaaggaaggcatcgtggagaanttcagggacaanttcacnggcgagcanggcganantctcnggcgaccacanggagaaganggncaagaagaaganggttaagaagaagcacggcgagggccacgnc

SEQ ID NO: 2103 - DNA, 242 bp, Zea mays
  misc_feature: Incyte ID No: 700160060H1
cttctgggcctcaaggaggtttatcctatgtggcaggacaggactctcacatgttgagttcaacacatcaaggagcttttccacctaggaatccatttgagtgagactagtaaagagagttttgctggatagtggtggacagaagaggaaggcaatcagcaccggtcgaaactcaaatggatactcaggtctactatactagatgcattgaaagcaactgtgcatcgaatctgaaaccctga

SEQ ID NO: 2104 - DNA, 241 bp, Zea mays
  misc_feature: Incyte ID No: 700160061H1
ttgcaccagaagactactctcttggctgtaatgttggaatagaggacccctctgcagctcacgatgtttcaatttgccgaaacagtaatgatgtgcatggaagcttggttgataacccactggcattaacaggtgacgatccatctttgcaaatttttcttccaagtcaaccttccactgttccccttcagcaagaattgagtgagcgttctgatactccaatggagtccaccctaacgat

SEQ ID NO: 2105 - DNA, 242 bp, Zea mays
  misc_feature: Incyte ID No: 700160062H1
  unsure 241: a, t, c, g, or other
cgacggcatcagtcggctcaaaacggttacgatgatactgtacgaggtgctcaggctgtacccgccggcggtgacgctgaaccgaagaacgttcaaagacatgcagatcggaggcatcacgtaccctgcgggggtgatcctggagctccccgtgatcgtcgtccaccacgaccccgacgtctggggcaaggacgcgcacgagttcaggccggagaggttcgccgaggggatctccaaggcna

SEQ ID NO: 2106 - DNA, 243 bp, Zea mays
  misc_feature: Incyte ID No: 700160064H1
  unsure 69: a, t, c, g, or other
agctgatcctcaccggcgtcgccatcgtaatcgccttggacagcggcaccagaacctctgcctccgcanggtgcttgctggtatcattacaatctggtagttttagtggttgggcttgacttcctactattcagaaacacagtaccgagaagtctttaggtggggtcaaagatggtgtcgctgaagttgcaaaagcgccttgccgcgagctacctcaagtgtggaaaggcaagtgtggcttga

SEQ ID NO: 2107 - DNA, 206 bp, Zea mays
  misc_feature: Incyte ID No: 700160065H1
  unsure 37-38: a, t, c, g, or other
gtagcaggtttccttatggttatcgcttgagctgatnnggagggaaggagctgtttgcttttgctgaagaataatggtgtagtcggctggggtgaggcgatgtgcgttgccagatacagttttgtcttgttgactctacttatctgattatcatttgtaagcgattgctcaagttatttgtcgtttatgaataacttgctttcctc

SEQ ID NO: 2108 - DNA, 240 bp, Zea mays
  misc_feature: Incyte ID No: 700160066H1
gagctcatgggcgtgcagatgatacaatgaaccttggtggaattaaggttagttccattgagatcgagaggatctgcaacagagtacatgacgccatccttgaaacagcagctatcggggttccacctgtagggggtggccccgaacaactaaccatagccgtcgtgttgaaggaccagagctctcaaatagaggacttgaaccagctgaaactagcatgcaacatggctctgaagaaac

SEQ ID NO: 2109 - DNA, 237 bp, Zea mays
  misc_feature: Incyte ID No: 700160067H1
tacgtcctcctccattaatattggcagcaagctagctaggatcatcagcatctgagcttattattactaaatcgatcggttgccatggcgatgagagtcggcaagctggcgctggctgcggtgctgctgtgcgcggcggcggccatggccacggcgcacaggcctccggcgtgcgcgccacctacaacttctacaacccgcagcagaacaatgggacctcaacgccgtgagcgcgta

SEQ ID NO: 2110 - DNA, 236 bp, Zea mays
  misc_feature: Incyte ID No: 700160070H1
  unsure 213: a, t, c, g, or other
ggttatttggcatttgaacatataacatgggctccataccagaccaagctgatagacaccgagcttctgacccctgttgagatcgactgggtgaacacgtaccactcagactgccggaagatcttggagcctcatctgaacgagcaggagaagcaatggctgatgaaagctactgagcccgtagctgcaagaggctgagcttttcgtcaacgntgcatgccaccgagcgccaggct

SEQ ID NO: 2111 - DNA, 237 bp, Zea mays
  misc_feature: Incyte ID No: 700160071H1
  unsure 158, 161, 165, 188, 192, 200-201, 205, 211, 215, 220, 233, 235: a, t, c, g, or other
ccgccggcgtttgagatgttggtttatcaggatctcctatctggcgacgagctcctgtcggattcattcacctacaaggagctcgagaacggcgtcctgtgggaggtcgagggaaagtgggtcacccaaggtcctgttgatgtggacattggtgccantcnatcngccgagggtggtgaggacgaaantttnataacacnnctgnaagggnggtnaatantttagacattccngncc

SEQ ID NO: 2112 - DNA, 237 bp, Zea mays
  misc_feature: Incyte ID No: 700160072H1
  unsure 57, 104, 137, 174: a, t, c, g, or other
ggcgctcaaggaccagggtggcctctgccgctggaactacgcgctgcggtccgtccnccgcaccgccaaggccaacgtccgcagcagcctcgccgcgcacggancaaggagctggccccggcggcggagtcgaagangcggccgggcaaggccgccgcggaggaggggatgagnaccgtcatgtacctcagctgctggggacccaactaggaggactagctagggttcactgttcag

SEQ ID NO: 2113 - DNA, 236 bp, Zea mays
  misc_feature: Incyte ID No: 700160073H1
gctccattgctcgcaaaaaatccttgtgagacacacaacatgctctgcatctgcaggcgttgtcgtcaccttggtggacgtagtacatcggtgcatggattatctgttgtttaatttgtacgttcagttcattctgtttcttgtattcttttggttcctttcctcttgtttattcatggatgatgaggtgtttctgttttattctctggttcagctgtaaccatgtaactgtacat

SEQ ID NO: 2114 - DNA, 237 bp, Zea mays
  misc_feature: Incyte ID No: 700160074H1
  unsure 145, 150: a, t, c, g, or other
atcaccaactaggatcgatctctcgacagcaaatagctagcaatggagaagtacaccaaagccctagcgtcattgctcaccatgctggtgctggcacctctcctcgccatggccaccgacccagaccccctgcaggacttctgcntcgcngacctcaacggcaagccatcagtgaacgggtacccatgccagccgccgtcgtcggccggcgaccagttcctcttctcgaccaagatc

SEQ ID NO: 2115 - DNA, 236 bp, Zea mays
  misc_feature: Incyte ID No: 700160076H1
cagagttctctcacctgaatattagacaaccttctcccccacctgtcctagctcaagtgcaccctgagcatggtcaaattcctccatcaagagttgctgatccaagaccaggacttgctacatctgcaaccggacgctatcagaatttgcatgtgccagtggcattaatggagtgtttcctgaggctcgctgagttaaataccgcaaagaatttggaaacctgtggaattcttgct

SEQ ID NO: 2116 - DNA, 234 bp, Zea mays
  misc_feature: Incyte ID No: 700160077H1
ggtgtgtagtagtagactatggttttgagagatgacgccaatgatagcgaacttcaggattccatgatgatattgtatattagttgatcgcatgccgtatgttcatttgttatctcccaatgaaggaatgctaagcacttgttattacaattttcgattttttttactaaactgagacacctatctatggatggtgttactcttttcttattagaagtgttctgtgaactgtct

SEQ ID NO: 2117 - DNA, 236 bp, Zea mays
  misc_feature: Incyte ID No: 700160078H1
  unsure 16, 37, 177, 180, 209, 221: a, t, c, g, or other
gacacaacagacagangaggaaggagaaggatatggnaggcgaggcgggaatggggctccgcgtccgcgcctcctccctcctgctgtcactggtcctcgagctcgccgtcgcgctcgtctcagtgtcggcgcacacaagttcgggatcaactacgggcagatcgcgaacgacctccnggnacccggcgcaggtggcgacgctcctgcantcgatgggcgtnaacaaggtgagtttt

SEQ ID NO: 2118 - DNA, 235 bp, Zea mays
  misc_feature: Incyte ID No: 700160079H1
  unsure 36, 53, 161, 170, 181, 189, 202, 213, 217, 234: a, t, c, g, or other
cgaaagcagcgtcaagatcctccggcagtgcaaganagcgatccctgcaaganacgccggagggaaagtggtgatcatgaacatggtggtcgggtacggttcgtcagataggtttgtcaaagagacgcaggtgatgtgcgacatgtggataatgcggtacnttggggttnagcgggaggancatgatgnaaagttttccccnagaggcggggntccncttttaaaaaccccccnc

SEQ ID NO: 2119 - DNA, 235 bp, Zea mays
  misc_feature: Incyte ID No: 700160080H1
  unsure 192, 195, 202, 205, 213, 218, 221-222, 229, 233-234: a, t, c, g, or other
cggggccgccatcaaggcgcccaggatcacatctaagaacctcatcagtgtcatcttctgtgaggctgttgcaatttatggtgtaattgtggcaatcatcctccagacaaagcttgaaagtgtgccaacatcccaaatgtacgatccggagtctcttcgagctggctatgcgatctttgcatctggtcttancgngggcccnaanatttttgnggggntgnnggggaanaacnnc

SEQ ID NO: 2120 - DNA, 233 bp, Zea mays
  misc_feature: Incyte ID No: 700160082H1
  unsure 86, 205, 226, 228-229, 232: a, t, c, g, or other
aaattgggcagttcaccgcagcgacagcatcatggacagcatctctacatcaaagggccagctctgtttgagaatgatgacccgcnaccggtcaagccgctgggaacaaggtgccagctctgcaagcttgatgttgctttccggacacaaggggatgctggccgtgatgccaatgctccaccagtcattgcagttttggcatgcnaccatgtgttccacagcaggngnnttna

SEQ ID NO: 2121 - DNA, 233 bp, Zea mays
  misc_feature: Incyte ID No: 700160083H1
  unsure 2, 6: a, t, c, g, or other
cnaganggaggcaccacgcaccatcttacattgcctgccgtaagcagatcgactactcagctcaaggttgaaggcatggctgcatccaagttctacgtcgcgagctgcgccctcctcctaatcggcgtggtgctgctggggcagcagggtatagatggcgccgtcgctgcctgcccccagttctgcctcgacgtggactacgtgacctgcccgtcctccggctccgagaaact

SEQ ID NO: 2122 - DNA, 166 bp, Zea mays
  misc_feature: Incyte ID No: 700160084H1
  unsure 57, 163: a, t, c, g, or other
ggaagctggaggagctgctttctaagctgaacccctcggcggaggagttcgtgccgnagtcccgccgccgcgtggacggcggcgctccccgcctttcggccgacgcgcccgtgttcgtgtcgccggcgatcgactactacgcgcgccaccaccagctcccgcngcc

SEQ ID NO: 2123 - DNA, 229 bp, Zea mays
  misc_feature: Incyte ID No: 700160085H1
  unsure 71, 73, 143, 204, 216, 220: a, t, c, g, or other
cgcaccgtcaaaggcaccaggctgagcaacccctccctctctccctcttatccccaaggcgaggagcggangnagaggagggcccttctgcttgtttctccgctttgcaagatgtcgtccccgagcaagcgccgcgagatggnccttatgaagctgatgatgagcgactacaaggtggagatggtgaacgacgggatgcagganttcttcgtcgantaangggccggcc

SEQ ID NO: 2124 - DNA, 219 bp, Zea mays
  misc_feature: Incyte ID No: 700160086H1
  unsure 64, 73, 160, 189, 207, 211: a, t, c, g, or other
cgcggcgccgcgctgacgatgatgcctcgccgcgcccttctcttcgccgcggtgctcctcgcangcctccgcngccgcggtctccgggtttcacctcggcggggacgagagcggtctcgtgaggggtgtgctcgccgcgctccgcgagcgggccaaggcngtggacgccgttcgcttgccgtcggccantacaacaagaaccagggngcgntttgaatt

SEQ ID NO: 2125 - DNA, 230 bp, Zea mays
  misc_feature: Incyte ID No: 700160088H1
gtgataattgcaaaatcattggaagatggccactcagatctcaaggaacttgatgtgagcacgaacatgctgcagagggttggagctcggtgctttacgcgggcagtcgcaaataaaccagattttgtgcagctgaacatcaatggaaattttatctctgatgaaggggttgatgaggtgaaggaaattctgaaggctggtaagaaatctctggatgtgctgggcccact

SEQ ID NO: 2126 - DNA, 231 bp, Zea mays
  misc_feature: Incyte ID No: 700160089H1
cttcgatacaattgttgaagtatccaaatttaagggtcatccaagtcctatggatgggattcaacctgctgttaaaagtgccttgacaaaggcatacaaacaaggaagtagttcccgtgttgttcgagcagcagatctaataaacattccaggcatgaaaaagcctttaaagaaacgagtggcggcgatcttggagccggtagaagagagcctacctgaagaaaatggact

SEQ ID NO: 2127 - DNA, 230 bp, Zea mays
  misc_feature: Incyte ID No: 700160090H1
cgcgcattgcattcacgcgctgtttgcacacaggccacacacgcatgcgaattatttgttcaaaaggaattgctggcgcgtcttgattatattactgcttataacttttactacttggtgcactggtgagagatgtctcataccaggttgcgggtttcaagtggccccgtttttattatcgtgatttgtgaaggttattagatatcatctccgccaacatttacgatcaa

SEQ ID NO: 2128 - DNA, 161 bp, Zea mays
  misc_feature: Incyte ID No: 700160091H1
ctcaagttttgttctcctctcctagctagccagcacctgcagatctgctcgttgccttgggctactgattttgtggaacgaagcgatggctcgcagcggcgccgtggtttcctgcatgctgctcctggtggtggcggcgcaactgctcatggtgatggcca

SEQ ID NO: 2129 - DNA, 230 bp, Zea mays
  misc_feature: Incyte ID No: 700160092H1
  unsure 178: a, t, c, g, or other
aaaaccctagccctcgcgccgccgccgccgtgcccagcgctcgagctcctcgcctgccgcgagctcgcgccgcaacgccaccatgaagttcaacatcgcgaacccgtctaccgggtgccagaagaagctggaaatcgatgacgaccagaaactacgtgccttttatgaccgaaggatntcccaggaggtcagtggtgatgctctgggtgaggagtttaagggttatgtct

SEQ ID NO: 2130 - DNA, 229 bp, Zea mays
  misc_feature: Incyte ID No: 700160093H1
  unsure 52, 54: a, t, c, g, or other
cgagcttgcacggtttgtgctgcgtttgctaggagtgagaagaaagccaaananggggggcagcattcaggggccagaagcgctggcgttcgagggacctagccggcagtctatcgaggcaccgaaaacgaacaactgggacaacgtctggggaaactgagatcatgcctatgggtgcaacgagttgaatcatatagaagaagtgcaagggctatgacctatgggagtt

SEQ ID NO: 2131 - DNA, 233 bp, Zea mays
  misc_feature: Incyte ID No: 700160094H1
  unsure 18, 33, 62, 107, 110, 113, 141, 144, 150, 155, 172, 175, 178, 181, 208,215, 222, 224-225, 227, 231: a, t, c, g, or other
gagggaccctgtggtggncatgccgcagcagcngcgccgccgccgcgctcacgcggagggcntcgtctgcgctgctgcagcgcctccactccttctccatcttcgcngtnccntccgcctgcttcaacaccaccacgccgnttncgcacnccgangccgtccaagaaacagnaanagnggngaaggacaggaacaccggcgacgaccnacacgtngacgagngnncnccanag

SEQ ID NO: 2132 - DNA, 231 bp, Zea mays
  misc_feature: Incyte ID No: 700160095H1
  unsure 190, 220: a, t, c, g, or other
agataatgttttctgcaccaaccacaaaggatacctccaatgcaaacatcgcaaaacagaggcttaagatgatcctgttctccgacaggtgtgaagtcagtgatgaggcaaagaaaaagatcgtggagaacatcattgaggcactgtctgagtttgttgagatagaatcaagggataacgtccaagtggnatctccactgatgctggcttggcacggtgnactctgtggca

SEQ ID NO: 2133 - DNA, 270 bp, Zea mays
  misc_feature: Incyte ID No: 700160105H1
cagtaattttatattgcttggtcactcttttggaggatatgttgctgcaaaatatgcgctaaagcaccctgaacacgttcaacagttgattttggttggtcctgctggcttctcatcagaaacagagcatagctctgagtggttaaccaagtttcgagcaacatggaaaggcatgctaatgaatcatctttgggagtccaattttactccccaaagggttattagaggattgggtccttggggtccaggtctagtacaaagatataccag

SEQ ID NO: 2134 - DNA, 268 bp, Zea mays
  misc_feature: Incyte ID No: 700160106H1
  unsure 48: a, t, c, g, or other
gaagtcgctgaggcaacagcgccttatgttggctcacaacttaaacangcgtgatgatctattttggtttggaaagcctcgggtactctggtggcttatacagttcatttcatttcagaatgcttttgagctggcgacattcttatggtctctgtgggaactcagtgcacatacatgtttcatgaagcactactacatggttgccattcggttgatttctgggctcctagttcagttttggtgcagctacagcacactgccgctgaat

SEQ ID NO: 2135 - DNA, 267 bp, Zea mays
  misc_feature: Incyte ID No: 700160107H1
aaagatggtgccttcaatatagaactagaagcaacggtggcatttttctcctaattttgattcagcagaaatgaagtgataattatgagatcatcgagacatccatgcctggcatactgcttacgacaccatcgacaccgagttaactgttcatgaatttccgaaggcttgttttatcccccgtctggggcgagttttgttagtctgtaacactctgggaaactctcctaacttaattgcaatcccttgtgctcctcaattgactgg

SEQ ID NO: 2136 - DNA, 266 bp, Zea mays
  misc_feature: Incyte ID No: 700160110H1
catcaagagcgctatttcaacctatgccattgaccatagtctcgagagcccaccagaaaatggaattgcttcgaaccctcatctgaaatcaaaagatggagaacaagggagtttgaatgggactctgcatattgtagatgatttgagcagcctaagcattcggtaatgcacgaacaagttgctgaatggtcacaactggaacacaacattttagaactggagccagtacccaattaaccaaagcgtacacgaacaaggggaacaaa

SEQ ID NO: 2137 - DNA, 266 bp, Zea mays
  misc_feature: Incyte ID No: 700160111H1
agcagctacatacgtcctcctccattaatattggcagcaagctagctaggatcatcagcatctgagcttattattactaaatcgatcggttgccatggcgatgagagtcggcaagctggcgctggctgcggtgctgctgtgcgcggcggcggccatggccacggcgcacaggcctccggcgtgcgcgccacctacaacttctacaacccgcagcagaacaactgggacctcaacgccgtgagcgcgtactgcgcgacgtgggacgc

SEQ ID NO: 2138 - DNA, 266 bp, Zea mays
  misc_feature: Incyte ID No: 700160112H1
ctccattaatattggcagcaagctaggatcatcagcatctgagcttatatattactacatcgatcggttgccaaatggcggggatgacagtcggcaataagctggcgctggctgcggtgctgctgtgcgcggcggcggccatggccacggcgcacaggcctccggcgtgcgcgccacctacaacttctacaacccgcagcagaacaactgggacctcaacgccgtgagcgcgtactgcgcgacgtgggacgccagcaagccgctgt

SEQ ID NO: 2139 - DNA, 271 bp, Zea mays
  misc_feature: Incyte ID No: 700160115H1
gtcccgcagcaacgccgagggagagcgaggagagacagatacagatcgcgcgctcagatgtcgtcggactcctcgtcgtgggcgcgcgccctggtgcagatctcgccctacaccttctccgccatcggcatcgccgtctccatcggcgtctcggtcctcggcgcggcatggggtatcttcatcacggggagcagcctcatcggggccgccatcaaggcgcccaggatcacatctaagaactcatcagtgtcatcttctgtgaggctgttgc

SEQ ID NO: 2140 - DNA, 274 bp, Zea mays
  misc_feature: Incyte ID No: 700160116H1
cacgaaggattcatggttggcgacagtctcaaggatgatgttgtttgtggaaagagggcaggagctttcacttgcttgcttgatgaaacggggcgatatggtcctcacgattctttacctgaggaagtaaaacctgacttcaaggtgtcctcactgacagaagtattcgctgtgctggaggagcacttcgatttggcaccagtgcctgccgagagtagaatatgacagggaagttttattggacctcccttctaatgtgaaatcggctacccaa

SEQ ID NO: 2141 - DNA, 178 bp, Zea mays
  misc_feature: Incyte ID No: 700160119H1
  unsure 86-87, 101, 147, 172: a, t, c, g, or other
atcgtccccaatccagtgagctgtaccaatccccatcgccccagaccagaccaacagtgagtacagcagcagctaagagcgtcacnngagagcgtgcgaanaggagggaggacaacaagaagccgatggcggttgtgagcggcacgncgggaggctgaacccctgggcgganctttcg

SEQ ID NO: 2142 - DNA, 266 bp, Zea mays
  misc_feature: Incyte ID No: 700160120H1
gtggatgatcgtagtaaaaaccgtacatttaaaactagctgcttcaacaccaggaagttgagtcctgtctttgttgctggtcccaacatggatgaggctccacctgtttggatcgatagagttggatttaaagccaacataactgagagcttcacacggcaaagcaaattcacatatggcctcgtggttgaagagattacaacacgtgatgaaactaatactatctgtacccatggttcacgagcaatgcctagcggcggtttgag

SEQ ID NO: 2143 - DNA, 94 bp, Zea mays
  misc_feature: Incyte ID No: 700160121H1
  unsure 14: a, t, c, g, or other
gcatgccgtaaganttgtttatggagcttttgttgttacaggacccctaaaaatgtttgtttgacggatgtttggaattgtggtcatgtttatg

SEQ ID NO: 2144 - DNA, 69 bp, Zea mays
  misc_feature: Incyte ID No: 700160123H1
  unsure 6, 57, 59, 61-64, 68: a, t, c, g, or other
cctgtnactcgcaagttgaggcatcaaagtttccagtttaactctgaaaaacaaaananannnnaaang

SEQ ID NO: 2145 - DNA, 264 bp, Zea mays
  misc_feature: Incyte ID No: 700160124H1
  unsure 241: a, t, c, g, or other
gtggatctccacagacgaaaaagctacaggatgttctccctggtatcattaaccagcttggccctgacaacatggagcacctgaagaggattgccgaggagatgcagaagcaggtggctgctgccggtgcggcacacaggtcaaggaagacaacgatgacgatgttccagagcttgttcctggagagacttttgaagaagtagctcaggagacaaaagcctgatcataggctctaaatagngaagtgttactgcaccaatgggg

SEQ ID NO: 2146 - DNA, 265 bp, Zea mays
  misc_feature: Incyte ID No: 700160129H1
  unsure 172: a, t, c, g, or other
cattgttgaaacaatgatgcagcagcttttgtccaaggagattcttcatgagcccatgaaggacattgtggaaaaatatccaaaatggctggaggataataaaaacaagataagcaaagaagaatatgagcgttataataatcagctagaactcatggtgaagcttattgangtctatgaaaatgatcctgagaacatgactaagatttttgacatcatgcaaaacatgcaagaatgtggtcagccccccagtgatcttgtccaa

SEQ ID NO: 2147 - DNA, 271 bp, Zea mays
  misc_feature: Incyte ID No: 700160132H1
  unsure 59, 69: a, t, c, g, or other
gagagagccccgggccgcgggtatattccgcgggctcggctcgctcgtcgacgtcggcngcggccacantcgccgctgcgatggccatcgctagggccttcccgcacatccggtgcagcgtgttggacctcgagcaggtggtcagcggggcacctgctgatggcacggtgaagttcatcgccggcgacatgttcgagtctatcccggctgcagattgtgtcttgcttaagtatgttctgcattgctgggacgacgaaagcagcgtcaagat

SEQ ID NO: 2148 - DNA, 266 bp, Zea mays
  misc_feature: Incyte ID No: 700160133H1
catcagcgggctcgtcgccgcgcaggaagctgcaaatccttttgaatattgtgatgtggttaccacaaccacgcacaagtccctcagagggccaagggctggcatgatcttctacaggaaaggccctaagccccccaagaagggccagcctgagggtgctgtttatgattacgaagacaagatcaactttgcagtgttcccatctctccaaggtggccctcacaaccacccagattgctgcacttgctgttgctctacagcaaaat

SEQ ID NO: 2149 - DNA, 262 bp, Zea mays
  misc_feature: Incyte ID No: 700160134H1
  unsure 75-94, 198: a, t, c, g, or other
ggatgaccatgccgacgacgacagggagaagaagaaacccactggcgtccagaagaaagtcaagggggaaaacannnnnnnnnnnnnnnnnnnnggcaatgtggagatcgtcgagatcgaggacaacactgccggatgcgtcgccatcagaaaggcttttgaaatgaaccactgcaagggcaagaggaaggaactttncccacaggatgccgcactgctcatccagatgaactacagggcgcacctggcccatcgctcccag

SEQ ID NO: 2150 - DNA, 199 bp, Zea mays
  misc_feature: Incyte ID No: 700160135H1
  unsure 168: a, t, c, g, or other
cgttgtatcaaaacggttctgagctgtaatgttatttcccaacccccagtgtaatcttggtgctatgggattagttcggtgctaagcagaacaaaaatgttgcatactacgcgtttttcagtcaaacgacatcctcttgcattaggaactgaattccatcctcttgcnttaggatctgaattccatggacaattttaac

SEQ ID NO: 2151 - DNA, 174 bp, Zea mays
  misc_feature: Incyte ID No: 700160136H1
ctagtttctcttcctcctgtgttccccgtttcagtttgcttatagccccgaagactcttttctcccgtagtgtcggaatgccagggtctgttgcgtaactgggatccgaatgtaccctgctgtgttcatcgttacattgaatggatctgaatgaaagtgggttagattggagct

SEQ ID NO: 2152 - DNA, 256 bp, Zea mays
  misc_feature: Incyte ID No: 700160137H1
attttgtttacccttgtaattgatgtgttaatgttgtttgtttcgaggtttctcttgaatgtaatcatcactggtaacattgtgtcttgagaggcaacaaattagagtctttgatgggcttctttctgtagctcattcagcgctttacgttgccaatagcaagcttggaataagttatcatgcattcactgtcttctcgaacagtgtgtgcatccccatgtccaacattcctcactttgcttaaacgctttgcaaa

SEQ ID NO: 2153 - DNA, 255 bp, Zea mays
  misc_feature: Incyte ID No: 700160140H1
cggagccatgtggcatgggcgtgatccatgattgtgatgcaactggattccaccctcatgaggagcccctagatggaacaccaatctatgagcattgctcccatgtgtacatgaacccaaatgtcaggtttgagatgacagacctacgtgaagcatgaaaagcgatattgacgactgttgcagattccaaaacccacaatgacttgcacatatctcatctgttccactcctgtgtacacaagttttgttttgaaa

SEQ ID NO: 2154 - DNA, 252 bp, Zea mays
  misc_feature: Incyte ID No: 700160142H1
gaccaagattgtcgtcagacttggtgtgttagcctgctcgccggtggccgtctctgcgtgggtgatggattggctccgggggtgcgggggagttatctgcgcccgcggtgtgcgttccctgcaagctgcgggtctcggtagctacagattggtggcaattcctcgccagagtcgggcttcgcctcagatccgccttgcctcgtcgtacgaccgcctcatagtctaaaatctcgtgaggatacgtatcatctg

SEQ ID NO: 2155 - DNA, 101 bp, Zea mays
  misc_feature: Incyte ID No: 700160143H1
  unsure 63: a, t, c, g, or other
tggctgattgccaatttgccatagtctttctgtatttgtctacatgtctgtctgggttgaagntgttacaataggtacagttgctgattttatacgtggct

SEQ ID NO: 2156 - DNA, 194 bp, Zea mays
  misc_feature: Incyte ID No: 700160144H1
cttcgtgcagaatgacatgttccgcctgaactatggctaaaagacagccgaaaactcttgtgatgaacgaatttgttaagggcttcatgttgagacgatgaataccgactgtcgccgctactctcatctcctttgtatctcctctgttggctgattaactgttattacaagaaattgctggacttgttttttcc

SEQ ID NO: 2157 - DNA, 260 bp, Zea mays
  misc_feature: Incyte ID No: 700160147H1
  unsure 2: a, t, c, g, or other
cnaagacggcagaaggctcttaacagaaaggatgaagaaagccgagcaggagacattcaaaataatagaagaaaatatgaagctcaaagatgagaacaaaggtagttatatcgtctcttgtcattgaagttgtacacttgatatgtgcattttcaattttcatccgcaggcagaagcagatgatcgaggagctgagtaagcagaatgagtcaaccctaggggccttggtccataaatgcactctgttggaccgctacaaa

SEQ ID NO: 2158 - DNA, 245 bp, Zea mays
  misc_feature: Incyte ID No: 700160149H1
  unsure 165, 233: a, t, c, g, or other
gtcgccgacgcgcaggccgtgcgcgtcaactactacccggcgtgcccgcacggcaggggcagggtgctgggcctgtcgccgcactcggacgccgccggcctcacgctgctgctccaggtcagcgccgtcccggggctgcagatcaggaggcgcggcgcgtggatnagcgtcgaacccatccccggagcgctggtggccaacgtcggcgactcgtcgaagtgctaacaacggangtacaagagcat

SEQ ID NO: 2159 - DNA, 246 bp, Zea mays
  misc_feature: Incyte ID No: 700160152H1
cgtcgagcaatggtcactgtgtcccagagctcagatcctgaggcggtcgtcagaaatatactgaaccaggtcaaaccactgtccaacaacgcggagaggcgaggcgaagatagctctggcgccgtctccttgaggaagaagaatccagtcattgcaactatattaagccgaattaggctgccgttcccaaatcaaaagcaagataatggtggcggtcgtgacaagcatgaacaaataaaaaaggag

SEQ ID NO: 2160 - DNA, 246 bp, Zea mays
  misc_feature: Incyte ID No: 700160153H1
cttaagatggcgtcaagcaatggtcagacagaagctccagcaccatctgtccccaaaaatcctgctatggcatcatgccggaagaagaaaacagatgatgctaccttccttgaagatctgaaagaccacatggatgagttcattcacgcctccatggatgagcacaagagctgctttaagaagacaattcagaagatgtttgggatgtcgaaggctgttgcagagagatccgcggcggaacaaaca

SEQ ID NO: 2161 - DNA, 246 bp, Zea mays
  misc_feature: Incyte ID No: 700160154H1
acaaagttgatcctcctggagggctctacgacctcacagaattgcttgatattgatctgtctagctacccagccaagcttccttcagccaccgatgtaagaaaacaatgatcaagcttgatgagatgggctattggtagggttgttgcgattgggggaaaatcgtgattagtttttttttactgttgaagagtgtcatagttaacattgtaaaaatgtgtgtatatttgtcctgatctttcccccg

SEQ ID NO: 2162 - DNA, 246 bp, Zea mays
  misc_feature: Incyte ID No: 700160156H1
  unsure 43, 218, 244: a, t, c, g, or other
ctcttttatgggttggcttcttggtagaaagggaatgtttggntattgcactgtcatcgtagtgttagaaccaacacaagcataggcactgagtagattgtcacggcagattattatgtacttcaattctggaatatttgatgggaatgccattttagattgcttggtaagtggtaaccgcctcaaatcacagagtagaacccgcttctgattcagcnggaaccatttatgaatttaagggggncc

SEQ ID NO: 2163 - DNA, 249 bp, Zea mays
  misc_feature: Incyte ID No: 700160158H1
  unsure 214, 219, 231, 235: a, t, c, g, or other
cgatctcctcccacccgcatccaagggtttccttctcgaccgtgcggaacgagccagagaacaggtatggcggcggcgcggcacctcagatccggcctccccctcctccgcgcccacctcgcatcctccgaatccgcggccgtcgctcaggtttcgaggggcttcgcgtcgcaggccgccaagcccaccgggaaaggagattcaaggttccaanggttntgtttgcggganaagnaatatgccagtgca

SEQ ID NO: 2164 - DNA, 247 bp, Zea mays
  misc_feature: Incyte ID No: 700160159H1
cgtattttgcatatagacgaagcacaatagatatgtctagtcttggagacttgtgggcacttgcacctgtcattgttgtaaatatgcaattggccatggacattattaggtggaactggataatacatgcgtttgtatggggcacaatagccgcaacaacagtttgtctctttgtgatagattcgatatgggttcttccagggtatggggcaatttttcatataatggggactggtctgttttggtt

SEQ ID NO: 2165 - DNA, 247 bp, Zea mays
  misc_feature: Incyte ID No: 700160160H1
gctttgttcaacctttgcaagattaataaaagaagacaggaacaggcagctgaaaatggaatcattcctcacttgatgaattttgtcatgtcagactcacctctgaggcagtatgccctgcctttgctgtgtgatatggctcatgcttctcgcaactctagagagcagttgagggctcatggaggactagatgcgtacttaaatctgttggaggatgatgcatgggcgtgcacggcattagattcta

SEQ ID NO: 2166 - DNA, 233 bp, Zea mays
  misc_feature: Incyte ID No: 700160161H1
  unsure 173: a, t, c, g, or other
cctctcacaacccagtcgctcaaaaccctagagctctcgcctgctcgcctccgccgccggagcgagctccccatcttcatccgtcaaccatggcgacccagatcagcaagaagaagaagttcgtcagcgacggtgttttctacgccgagctcaatgagatgctgacgcgggantggcggaggatggctacttggcgtggaggtgcgcgtaacgccgatgcgcagggaaataat

SEQ ID NO: 2167 - DNA, 135 bp, Zea mays
  misc_feature: Incyte ID No: 700160163H1
  unsure 111, 113, 115, 118-119, 124, 128-129, 133: a, t, c, g, or other
cttgtattctacatgttgggagcatatagatctttcataaaaacacacgtcccatgtattgcaaatcttcatagatccaattatctcatgggtatgttcattatgttcaanananaannaaaanaaannaaanag

SEQ ID NO: 2168 - DNA, 250 bp, Zea mays
  misc_feature: Incyte ID No: 700160164H1
  unsure 220: a, t, c, g, or other
gtagagcaccaggatgccggcgacgccgacgatcatcggtgccctcctggggctgggcacccagatgtactcaaacgctctccgcaagctcccctacatgcgccatccatgggagcatttgttggggatgggtctcggtgcagtgtttgtgaaccagctggtaaagtttgatgagaagctcaaggaggacctcgacaaagatgcttgaagcgcgccaggntagccaacgagcagcgctacattgacgatg

SEQ ID NO: 2169 - DNA, 240 bp, Zea mays
  misc_feature: Incyte ID No: 700160165H1
ggtgagctgcggttggagctggacgagctgcggcggctggagagcctcgccaagcacccccgcgtccagatcctcctcgccaacgaaatccgcaacgttgaagcgaagttggcgaaggcaaccgaaccatcgcctgagccactggcggcggcttctgcgccacgcccgcgcccgctgcgcgtcctgttttaagctacgtcactcttgggtcgttcagtgggagcaggacaacgagaagat

SEQ ID NO: 2170 - DNA, 240 bp, Zea mays
  misc_feature: Incyte ID No: 700160167H1
  unsure 89: a, t, c, g, or other
ctcggtctaagtgaccgtttgagagagggaaagagttgaaagagacctggtctttgtgaccacctcaacggggagtaggtttgcaaganccgaacctcgttcaaacaaatcatcgtgtcatccgccttatttgcttgtgatttgttttcgccctctctttcggactcgtttatatttctaacgctaaccccggcttgtagttgtgcttaaagtttctaaatttcagattcgccctattca

SEQ ID NO: 2171 - DNA, 243 bp, Zea mays
  misc_feature: Incyte ID No: 700160171H1
  unsure 153: a, t, c, g, or other
cttcaacggcgtcaagttcaccgacgtccccatcaacccgagggtccgcttcgactacatcctcgccttcgtgatcgactacaccaccgcgacggagccgcccaccccgaccaacggccagttcaacatcttctggcaggactcggtgctganggcgtccgcggtggccgccatcaagcagagcaacccgaacgtgcgggtggccgtcagcatcggcggcgccaccgtgaacgaccgccctgt

SEQ ID NO: 2172 - DNA, 243 bp, Zea mays
  misc_feature: Incyte ID No: 700160172H1
  unsure 157, 197, 204, 224: a, t, c, g, or other
agtcgatacaccatgattctcaccgttctttcccatctaatgtgaatcatatgcaacataatcttcatgggccaggggtccctcacttggaccctgctggacatattatgcgacaacacatgtccatgcctggaagatttcctccagaaggcttgcnaagaggtgtccctccatttcagcctgtgcatcacatggcnggttaanagacctgaaatgggtaatgnaaaaaattcccataggccc

SEQ ID NO: 2173 - DNA, 239 bp, Zea mays
  misc_feature: Incyte ID No: 700160173H1
  unsure 56: a, t, c, g, or other
ggggttcatcgggtctgccagaggcctgacctgagctagaccatcgtgtattattnggttttatacaatgtttgcatcctctgcatctcatgctcttttctgttttcagcatgccttttgacattttttacattatttgctttaaaaaactatagccataccatgaataaatctgctgactttgtgactgtcagaggaattaaaagagaagtatgctatatagggtaagttgcttattt

SEQ ID NO: 2174 - DNA, 242 bp, Zea mays
  misc_feature: Incyte ID No: 700160174H1
  unsure 186: a, t, c, g, or other
cccgaaggcaaatatgtggtggatatagataagagcattgatatcactaagatcacaccttcaacaagagttgctcttcggaatgacagttatatgctccatctgatcctaccaagcaaagttgatccattggtcaatctcatgaaagttgagaaggttccggattctacctatgatatgattggnggccttgaccagcaaattaaagagatcaaagaggtcattgagcttccaatcaaaca

SEQ ID NO: 2175 - DNA, 242 bp, Zea mays
  misc_feature: Incyte ID No: 700160175H1
  unsure 63, 192, 198: a, t, c, g, or other
gtgcacgtggccggcggcaacatcctgccgctacagctgccggagctgacgacgtcgcgcgcncgccagaccgcgttccacctcctggtcgcgctcgccgaggacggatccgcatccggggagctgttcctcgacggcggcgagttaccggagatggccgggccgcggggcgagtggagtctggtgcggttnacttgnacgcaggggcgcgacggggttaagctcatgtcgcacgtggtgca

SEQ ID NO: 2176 - DNA, 239 bp, Zea mays
  misc_feature: Incyte ID No: 700160176H1
  unsure 173, 225, 230, 233: a, t, c, g, or other
gaggaggtgagccaccggaagcggagacgtgagtagtcgaccaaccccgtcgatccggctgcggcgcggcgtgctagatcgctaccgaccatggtggtggaggagatcgccgagggggtgaagaacctcaccgttaccggagatgcggcggcttcaggcggagaggggcagangaggggcggcggcggcagcagcaaccgcatccaggtgtccaacaccaagaanccctnttnttttag

SEQ ID NO: 2177 - DNA, 185 bp, Zea mays
  misc_feature: Incyte ID No: 700160177H1
  unsure 80: a, t, c, g, or other
cagtgacctgccgtggtcgtccgtcgtcatcgagaccgtcgcggacgccgccggtagcctcgtgctctagataataagcnaataagcagtttgaagcttgcttcgcatgcatgttgcaacaaataagcagctagtagcgatcgatcgattggaaataaagcagctagtagcgatcgttattacag

SEQ ID NO: 2178 - DNA, 243 bp, Zea mays
  misc_feature: Incyte ID No: 700160178H1
  unsure 85, 90-111: a, t, c, g, or other
agacaatagcacagaaagaaggtgaagctaaagaattgtgtaagaagctggatgcccttgaaattgagttgggatattatgaggngcagnnnnnnnnnnnnnnnnnnnnnnaagagaatcataaggttaaatttgatgaagcttcacagaagataaaaatcttggaggaacaacttgcagagacacagagcaagttggagcatttccttatagagaaggaaagcttgactcaaacaaatagta

SEQ ID NO: 2179 - DNA, 244 bp, Zea mays
  misc_feature: Incyte ID No: 700160180H1
  unsure 95: a, t, c, g, or other
cacgacacgaaccaggcagctgcggagggaggaaccctagcggaacaggtgacggcggcgcgctaccggtgacgggggatacggcggcatcgtcncctcctccatccccggcgcggcggcgccagcagccggcctgcaggctgtttgaagagctcgccatttaatctcaatggaagccaagtttttccgtttcctgaagctcgttggggtcggcttcaaagcgaggtcagagagccaaggccgt

SEQ ID NO: 2180 - DNA, 235 bp, Zea mays
  misc_feature: Incyte ID No: 700160181H1
gatctacccgccggaggtgaaggcgagccccgatgcgccacgcctggccaaggagcggctcgccaagatgggacccatgagcaaggaggagacgatcatggccggcacgctgctgcttacggttggtctttggatctttggaggcatgctgaatgtggatgcggtttctgcagcaattcttggcctagcagtcctcttaatctcaggggttgtcacatggaaagagtgttttgca

SEQ ID NO: 2181 - DNA, 213 bp, Zea mays
  misc_feature: Incyte ID No: 700160184H1
gcagcgggtcctccgtctgcgagttctccatccagggctcctactcgctccgctaccagaccaagatcaccggaaagatcgcccccgaccacctcaccgacctcgagggcgtctccgtcaaggtcctcttcttctggctcaacatcgtcgaggtcacccggcgcggcgacaacctcgagttctccgtcggcatcgtctccgcggacttcggga

SEQ ID NO: 2182 - DNA, 144 bp, Zea mays
  misc_feature: Incyte ID No: 700160185H1
  unsure 30, 54, 71, 82, 84, 89-90, 96, 98-99, 102, 105, 121, 127: a, t, c, g, or other
ctcttgcttctcccttctttcttgacttcncgaacaacagccgaataataatanactagcgctaggagcanaggaattttgntngaggnnaagtancnngancgnccgggggaaaaaagancgtgtnttgatgacgtcgtcgtc

SEQ ID NO: 2183 - DNA, 235 bp, Zea mays
  misc_feature: Incyte ID No: 700160186H1
cagaaagatgaggcagagatccaagtaggcagatcgagatggattgtggacctgatgacatgcgtgggtacatacatttcttcggatgcgttggtgtgcctgtggagagatgtcaacctgccatggtgtcacggtccgccatcagttgaacgtcttgcctgcacttcagtaggccatttttcatggttctagttgtatttgaatccagcgtttgccactaagataaatcagacat

SEQ ID NO: 2184 - DNA, 179 bp, Zea mays
  misc_feature: Incyte ID No: 700160187H1
  unsure 71-72: a, t, c, g, or other
ggctgggctacccggggccgacgccctacccgacggagatcggcaacgggcagtgggcgtccttcctccanntccacaagaccggcgcctcgtcggggtccatggccgctgtcgtctaccgcggcaaggacggcggcggcacgagcgcgacttcgccatggcctggagcaccccctggg

SEQ ID NO: 2185 - DNA, 235 bp, Zea mays
  misc_feature: Incyte ID No: 700160189H1
  unsure 34, 158, 204, 225, 234: a, t, c, g, or other
ccacgaccacggcgtcgtcgcccagcgccaggcncagggcagtgcatggccgtacggtggggagcaccacaggaataaaaaggacgcgtgatcgtccagctggccggccgatcgaggatatggatatgcatgcatgcaacttgcagtgcgaggggatnagatcaagaagtagctgtgcggaggaatggaatatgcatgcacgcntgcaatatgggcgggtaagtngcaccgacnt

SEQ ID NO: 2186 - DNA, 193 bp, Zea mays
  misc_feature: Incyte ID No: 700160190H1
gtcctccccggtgagcttgccaagcacgccgtctccgagggcaccaaggccgtcaccaagttcacttcttcttaggctcatagtactaggctgggtggtgttggtagacgtggctcaatttatctggtaggggtagtgatggatgatatgatctgcgtctatttgagctgttaagactgatgaacattgttcc

SEQ ID NO: 2187 - DNA, 235 bp, Zea mays
  misc_feature: Incyte ID No: 700160194H1
  unsure 49, 141: a, t, c, g, or other
cttcttcctggagagaaaaagcagaagacaatacaaagatgtccaaganggcggaggagaaggcggcggcagtgggcggactcggaggagccggggcggcggacgcggcgcacagcagcagctggcagcaggggaggccgnggcggctcgggtgcggcccgtggaaacgctgcttcgcgcggcaccgctggggctctgcgtggccgccatgaccgtcatgctacgtaaccagcag

SEQ ID NO: 2188 - DNA, 87 bp, Zea mays
  misc_feature: Incyte ID No: 700160195H1
gcctttgtttagtagtatggtttggtactttgttctgtcatcactcgtttatctatccctaatacatgccgccatgattgtactccc

SEQ ID NO: 2189 - DNA, 173 bp, Zea mays
  misc_feature: Incyte ID No: 700160201H1
  unsure 45, 57, 66, 71, 78-80, 82, 89, 119, 122, 128, 138, 151, 168, 172: a, t, c, g, or other
ccatcagcgatccttctctcttgagtgtcctcccatctcatccantccatccccgcnaccacaggnaaagncaacccnnnangagccgncatgggctcccgctaagaggtggaggtganggnggggtnggcgagcaanctgaagaacgtcnactggcgaaacgacganatang

SEQ ID NO: 2190 - DNA, 272 bp, Zea mays
  misc_feature: Incyte ID No: 700160202H1
  unsure 185, 248-249, 264, 267-268, 270: a, t, c, g, or other
ctgcagccggcagtcctcgcctccgcctcctccaccctgaccgtcaacagaggaagacgaggatgtcgggatccaaggtgtacaccctcgaggaggtggctaagcacaacaccaaggacgactgctggctcgtcatcggcggcaaggtgtacaatgtgaccaagtttctggaggatcaccctggnggcgatgatgttctgctgtcttccactgccaaggatgctaccgatgatttcgaagatgtgggnnacagcagcactgccngtnnantg

SEQ ID NO: 2191 - DNA, 272 bp, Zea mays
  misc_feature: Incyte ID No: 700160203H1
ggtaagcagcagcaggaaccctagcaccgccgcatccgcagccatgggtatcgacctcgttgccggtgggaggaacaagaagaccaagcgcacagcgccgaagtccgacgatgtttatctcaagctccttgtcaagctctaccgtttcttggtcaggaggaccaagagcaacttcaatgctgtcattctcaagaggctcttcatgagcaaaaccaatcgcccaccaatctccatgcgccgccttgtcaagttcatggaaggaaaggagaaga

SEQ ID NO: 2192 - DNA, 240 bp, Zea mays
  misc_feature: Incyte ID No: 700160204H1
  unsure 68, 83, 185, 190, 217-218, 221, 223, 228, 235: a, t, c, g, or other
attgtgtgcctcaacatattggggagcttgaagcatcgacagttgctagtcattgcttacttatatangaacataagtagtanttgctattgtcaagtgtgccttgcttgatgcaagttgtgttttcgtctcattattattatgcacggccatcgtacgtgtatggcttgtatgggttattgccnacttnataaaagcacactctgtttgcctatannaananatcanttgtagnaaaaa

SEQ ID NO: 2193 - DNA, 272 bp, Zea mays
  misc_feature: Incyte ID No: 700160206H1
  unsure 68-69, 97, 141, 143, 269: a, t, c, g, or other
ctttgcgtatttgattccactcgcatatagaactatcatatatcctgcgataaccctacccttctgannaagggaagaggatcagagttcaactgangaggagggaagatgaatagatgatggtaggggtcgcgtcacgangnaggaggggcggtaggtcattattgtgggatgaacaatgatctaaatagtattgttcattggatttgaataagagtggagaggaggttatacaacgatttaatttagtgtgttaagtctggatgtanttt

SEQ ID NO: 2194 - DNA, 271 bp, Zea mays
  misc_feature: Incyte ID No: 700160209H1
  unsure 54, 269: a, t, c, g, or other
ggggaagaagcctctggcttacacaagagacggagatgcatgggtaattgatantggcaaatatataagtgaatcagcttctatatcaaaagggtttcctctcaaccatatcaatcaggggatatcaggatataaaaacttgagcccttcttgtaagctgcgtgttctgaattttctttgtgatgagaccctctctactgacaagctgaggaactggattgacatgcaaaatgacatagctgctgaaccagtgaatgctgctagagaanag

SEQ ID NO: 2195 - DNA, 272 bp, Zea mays
  misc_feature: Incyte ID No: 700160211H1
ggcggctcattgacgaggagcggcggaggctggacgacggcgtcgagagcgagaacaaaagtatgatggctgtgctgctcactctgcagaagtcagaaccggagaattacagtgatgacatgatcatgtctctgtgcttctccatgttctctgcgggaacggaaaccactgcgaccacggcggaatgggcgatgtcgctgctcctgaacaaccccgaggtcctgaagaaggcgcagggggaaatcgacgcgcatgtggggaattcccgcctg

SEQ ID NO: 2196 - DNA, 271 bp, Zea mays
  misc_feature: Incyte ID No: 700160212H1
caaggaggaccagtaaacaagagtcctgcaagcgggggcagaacttccacagttccaaatcacttcctgtttaatcgagttgttgtacgagaaataagaatggaaattactggactccatccatgcttctcatttgcttgttctgataatcatatgctcttcatctagtgcatattgaagtgatgtttcctgtcataaaatggaattgtactatctttgtcgtgcagtttaaactgaccgccggcatctcagttttttttctttggttttt

SEQ ID NO: 2197 - DNA, 270 bp, Zea mays
  misc_feature: Incyte ID No: 700160213H1
  unsure 40, 107, 196, 202, 217, 250, 255: a, t, c, g, or other
ggatctccctctcattccagaggactccgcgtcgtcaggnccgcttcgcgtgcaacgccggcatatagggtttcgccggcgccggcgatggacccaccccccgtaanccccgatcgctgggggcccagtcagggcgctggcgtcgggccctccggcctccgccgatatggcctcaatttctccgcctccagcctcntccagncccccatcgcggccntccttgagtactccggcgtagtccagtccggcnctgcnctggcggcgcaccaa

SEQ ID NO: 2198 - DNA, 271 bp, Zea mays
  misc_feature: Incyte ID No: 700160215H1
  unsure 27, 82: a, t, c, g, or other
gtttccaagacaggacttccgcctgcntttccgcaacatgtctcctggcgcagtcgatttgttggaaaggatgcttgtgttngatccaagcagacggattacagttgatgaggctctgcatcatccatacttggcttcacttcatgagatcaatgatgaacctacctgccctgcacctttcagctttgattttgagcaaccatcctttacagaagcgcatataaaagaactcatctggagggaatctttagcatttaacccagagcctccc

SEQ ID NO: 2199 - DNA, 273 bp, Zea mays
  misc_feature: Incyte ID No: 700160216H1
gcagagtgacgtgtttgatcaagtgattagagagtgcaatgagcacaactcacaatttcaatcgttgatcaggaaaatggtggagcaaaacttagatatcgagacaactagaaatgaagatcactatggtgcagctatccaccatctttccctgctccgtaacaaaagatgccttatggcttacatgtacaaccgagcagaagttatccagagttttagatggaaaattggccctgtgcttcctcatgacatacaagaaaagctccatttctc

SEQ ID NO: 2200 - DNA, 212 bp, Zea mays
  misc_feature: Incyte ID No: 700160217H1
  unsure 43, 63, 116, 186: a, t, c, g, or other
gatccacgacgacgatggccgtggcggcctcggcgggcgggtngtaccagcaggaggccagcnccgccgtcgtctctgctgactacctgcagtaccagatgatgcttctgcagggngccgccaccagcggccaaggcagcagcagcagtcatggcggatatcctctgtactacgactatggcggcnaggcggggctggcgttggcgttggcg

SEQ ID NO: 2201 - DNA, 258 bp, Zea mays
  misc_feature: Incyte ID No: 700160218H1
  unsure 231, 257: a, t, c, g, or other
acgggacagcacttcaatggcggcggcgcctcctgccgcagaggcagctcttcttctcctcctagcattactggcactcgccgcggtggctctgagacgcggcgatgcgctgagcctggatttgtacgacgtgacctgcccggaggtggaggcggcggtgacggcggccgtgcggcaggccatggccaacgaccgcacagtggcggccggactcctccgaatgcatttccngactgttcgtaagggtgctaggctcnt

SEQ ID NO: 2202 - DNA, 264 bp, Zea mays
  misc_feature: Incyte ID No: 700160221H1
  unsure 145: a, t, c, g, or other
caagcgcaatggcatcacgccgacgagcgagctcaccatcctcgagcacgacggtgactcctacgtggcggagattgacggcaaggtcattgtaaagatcgggtccaggtacgacgtcggccatctcatcccggcgggttttgangtcgccgcccacggcaacgactacgccgtctgggagaaagccggcgccgaacaagtgactcgagcataatagagtgctcgagataccgatttgattctcagtacaatgtacagggactg

SEQ ID NO: 2203 - DNA, 156 bp, Zea mays
  misc_feature: Incyte ID No: 700160223H1
  unsure 43: a, t, c, g, or other
ctgaattggccatgctaaggaaaaggatagtgcaatgtgaggnatatgtattttctgaaagccagatcgtttgggtctagccctgatgtatgcagaacaagtgattattgtaatggatcctgattatcctcatcatcctattattgttttctggtc

SEQ ID NO: 2204 - DNA, 235 bp, Zea mays
  misc_feature: Incyte ID No: 700160224H1
  unsure 233: a, t, c, g, or other
cttgctggatgcaaaatgcttcaagtgaggaaagagtttttgggtccaattctaaaacagccatggatgatagcttttgatatggcgtgctggttatgattatgctgtggagttttggccatgttaacgggaggtcgtgctcgcgaaaccttctgcattatcgcatcggaatcgtttgtcatgtgcatcctagtgaatagatatattatgaaaatatatctcctgaaatttantg

SEQ ID NO: 2205 - DNA, 265 bp, Zea mays
  misc_feature: Incyte ID No: 700160225H1
  unsure 110: a, t, c, g, or other
aagccgagcaccgcagaaaaagaaaaagaaaagccaaaggcaaaggcaaaggaatcccaatcaggcaagcaaaaggaagaaccagctgctgcggccggagatgtcgtcgnagctgatcgaggagcaccggtcgggcgcggaggtgcacgtcgggcacgagctgtgcgagcgcaagtcgcgcgagttcatggtggagctgggcctccccgacgggctcctcccgctgcccagcctggacgaggtggctacaaccggtcgacggggt

SEQ ID NO: 2206 - DNA, 264 bp, Zea mays
  misc_feature: Incyte ID No: 700160226H1
  unsure 145: a, t, c, g, or other
cgccatcacgggcgccacggcgctggacatggccttcttcgaggagcacgggctggcgcgcgccgtgtggagctccggctcgctccacacccagatcgggtggttccgggacatgaagcccaacatctgcagctccccgcaagantgccgtgagctgttccggcggtcgctgttcgtggtgggcgagttcgggggcaacgactacgggtcgaccatcttctcgttccggccgctggaggagtgcacgcgctggtgccgcacgtg

SEQ ID NO: 2207 - DNA, 266 bp, Zea mays
  misc_feature: Incyte ID No: 700160227H1
aaagcaacaaggcagcagcacaagcaagaaccacacctcctcccttcgcctgtgatcatgtcgtcttgctgcggcggcaagtgcgggtgcggctccagctgctcctgcggcagcggatgcaacggctgcggtatgtaccctgacgtggagaccgccgccaccagcagcgtcaagaccacggtcctcgccgcgccgaccaccaaggccagcgccggcggcttcgaggcggccaccgagggcggcggctgcgactgcaacacctgcaa

SEQ ID NO: 2208 - DNA, 263 bp, Zea mays
  misc_feature: Incyte ID No: 700160228H1
ctggataaaaaagttcccgttcttttgcagtgaccgtgaatacatctttggaggacgcatatgggaatctgggaagacttactattgtgttactaagggtgttccatatccatcattgcccaagaaagaaaaaccgaggcgtgtggagctgtacttctcaagttggcgtattagagctgttcaatcgcctaaacatgtgggtcagcaatctgcgtgtgaagtaactttggttcactatgaggacatgggtataccaaaagatg

SEQ ID NO: 2209 - DNA, 206 bp, Zea mays
  misc_feature: Incyte ID No: 700160229H1
  unsure 86, 95, 148, 151, 155, 157-158, 162-164, 169, 173, 175, 179, 182, 193,199-201, 204: a, t, c, g, or other
gtgaagatgattggatcgagatgaaataagtctgtttagattagttaaagtgatcctggcatatgtcctgccttttaatggacacntgcttgtanttttctcgtggacttgcacacgcatgattggaatataaaacgatacgataaanaanaaanannaaannnaaaanaaananaaanaanaaaaaaaaaanaaaaannnaanac

SEQ ID NO: 2210 - DNA, 263 bp, Zea mays
  misc_feature: Incyte ID No: 700160230H1
  unsure 241: a, t, c, g, or other
ggaagtacaatgctatcgacaagtggaatactcagctgaagtccatttaccaaagcattgtccaacagagtttgatgaggaggatcgctgctgctgctgcgtgcattgcacacctagaattgttgatagcctgttttgtggatttgagggcaactgcaaagaactgtctggtgacgcttgcgatagaatcctggatttgggtaaagttaatattgactacgaggtcgtctctgaaaaaaanaaaaaaaagggcggccgctcta

SEQ ID NO: 2211 - DNA, 263 bp, Zea mays
  misc_feature: Incyte ID No: 700160232H1
gaatcattccagcctcatgggaaccgtgatcctatcccttttgatctgctaaagattactagtgccttgatcgagcatgactcaaattggcattttgaaagactatctgaggaaatagatcttttcagagagttacctgatgacaacagcaagtttgggaagttgacattagcccggttattgcttgcttgttctgctataaaatctcgtggaagatctctaattgaaaggaagggatactgtgaagaggcactggggccttc

SEQ ID NO: 2212 - DNA, 258 bp, Zea mays
  misc_feature: Incyte ID No: 700160234H1
gccgtgtgtcgaacacgacacgcgataatggcactcatgcaggagagcagccaggacttgctcgaagcgcacgacgagctcttccaccactgcctgtgcttcgccaaatcgccgccgcattcccgcacgtcaagtgcagcgtgcttgacctcccgcacgttgtcgccggtgctccatccgatgcctgcgtgcagttcgttgcgggcaatatgttccacagtattccacctgcaaccgccgttttcttcaagacaactc

SEQ ID NO: 2213 - DNA, 259 bp, Zea mays
  misc_feature: Incyte ID No: 700160236H1
gtaacatacaagctgcaacatgttcaggatggcaacacagagcaatgcgtaatttgccgtgtggaattggaggagggtgaatctttgattgcactcccctgcaagcacttataccatcctgaatgcataaaccagtggctgcaaataaataaggtatgccctatgtgcagcgcagaagtatcaacctcgggtaacaaggagccatgactgctctccgatggcaatcttgggaacttggtgggaataactagcggcatca

SEQ ID NO: 2214 - DNA, 258 bp, Zea mays
  misc_feature: Incyte ID No: 700160237H1
  unsure 253: a, t, c, g, or other
cgaacagcagcaaggggaacgcgctgaacgagctccttgagctcaggagctgctccagctgccttttcttcgagtgcagaaaacagaaggatctttacctttggatggtgaagtctcctggaggaccatcagtaaaatttctagttaatgctgttcacaccatggaggagttgaagcttaccggtaaccatctgaaagggtcacgcccacttcttacattttctacaaattttgatgagcaacctcattggangcttg

SEQ ID NO: 2215 - DNA, 58 bp, Zea mays
  misc_feature: Incyte ID No: 700160238H1
ggcgacgctggaaggttgcacagaattttgatagtgtctctggtttcattttgaaagc

SEQ ID NO: 2216 - DNA, 257 bp, Zea mays
  misc_feature: Incyte ID No: 700160239H1
agaaagccacgcgaaatccactcatgtaactgatggagtggactaatgcagtctagtatgcgacgatcaatctctgtacacccggtagaaaaagttcatgagcttcatggcagttagaatcaggattgagctgatattcatcccgcttgatgtgtagctagcattcttgtaactggaattgtgtgtgtaatgcaaatcatgggcgcattagactgtaatgaagaaaaagtcagggctgcgcctttagaatgcacttg

SEQ ID NO: 2217 - DNA, 258 bp, Zea mays
  misc_feature: Incyte ID No: 700160240H1
gcaaggccgcaccggccgagacgcttacgacggccgacgagctcttcgagaagggcaagatcagggcttcgaagccgacgcccaagacggccgacgaacccaaggtccgtccgctgaagccgccgccctggctgctcgacggcgggagcgtcccgccgtcgcctatgggtcgaggcggcatgcggcggaggagcagagcgagctccggtgtcgacttcgacccgttcaccgccgcgtgctggaagcaaccaaagcgcc

SEQ ID NO: 2218 - DNA, 259 bp, Zea mays
  misc_feature: Incyte ID No: 700160241H1
ggccaacgcaggctcgcttggacatttgaaagacaaggtaccaagttggaatggcggtggaagctgcagccttcaccaaacacgcagcagactatatctgagatcctggattttcttatggatgcaaatatacgcttaagtgaagaggttgtgaggaaaacacaatcctttgacaagttgaaacaagaagctgagaagtgcttgcaacaaagtgagagatttaacaatgagaaagctgagttcgaacaagccgcctttt

SEQ ID NO: 2219 - DNA, 259 bp, Zea mays
  misc_feature: Incyte ID No: 700160243H1
  unsure 50: a, t, c, g, or other
gacctccctgagcaacaacctggtgaaggttgtccccactgcactcacangctcaggaggtgatgctggcaacatggatgacttcgaggagttccagggatatgatgagttttagtttactttagtggcaaaccccaagtcagctgcctgtgtaggcttatcatctacgtttcgtttcttcgcactttgatagttatgctaaagacaatggttatgtaatagactctatggatgtcttggacatcttgttgtaataaag

SEQ ID NO: 2220 - DNA, 256 bp, Zea mays
  misc_feature: Incyte ID No: 700160244H1
  unsure 204: a, t, c, g, or other
gaggtagcagcaaggatcagagctaataatatgatttgacttctctggtgcctctgtatatgtccgttacagaaacactagcctgctggcgtgcacatttgtggcttctcttccggtcttcccgcaggctatcaatatgtatgaaagcttgacatgaagtacatacctgttcttggtatatacgactcaaaaagactaattcantttttttaattttaggagtaataggagctaataatatccaaccatcaaacca

SEQ ID NO: 2221 - DNA, 258 bp, Zea mays
  misc_feature: Incyte ID No: 700160246H1
  unsure 112: a, t, c, g, or other
atgctggtgacacagaggcctcgcctcgtggccatggcaccgcggaagactgagaactttcttgtgaccatcagctcctcttttaggagccatggctttgctccctccagangtttatagctctgcacttttgtcttctggagatggagttattcagttcacagcgaacgaataatacgatgttcttagtttcttttttttttcccgcttctttgtctgcgaggatttattggttaaattgtgtactagtcaattgtt

SEQ ID NO: 2222 - DNA, 219 bp, Zea mays
  misc_feature: Incyte ID No: 700160247H1
  unsure 68, 92: a, t, c, g, or other
ttcatcgaccagttcggcgacagggccgacacccatgccaggttcagctactaccctccgtgcgcgcngccggacctcgtcttcggcctgangcctcactccgacggcacgttcctctcgcttctcatgctagacgacagcgtcggcgggcttcaggttttccgggacggagtctggtacgacgtgcgcaccagacctcacaccctgctcgtcaatcta

SEQ ID NO: 2223 - DNA, 258 bp, Zea mays
  misc_feature: Incyte ID No: 700160248H1
  unsure 103: a, t, c, g, or other
acaagttgatgctgctccattcaagcagtggtacctcactcactatggagtggacatcggtaggaagaagaaggtgcctgttgctaagaaggatgcgactganggacaagagggtgaggctatagctgaggaaacaaagaagagtaaccatgtgcagaggaagattgagaagcgacacaggaccgtgcactcgacactcatattgaagagcaatttggcagtgggagattgttggcctgcatttctgcccgtcctggg

SEQ ID NO: 2224 - DNA, 235 bp, Zea mays
  misc_feature: Incyte ID No: 700160253H1
aagcagcagcacaagcaagaaccacacctcctcccttcgcctgtgatcatgtcgtcttgctgcggcggcaagtgcgggtgcggctccagctgctcctgcggcagggatgcaacggctgcggtatgtaccctgacgtggagaccgccgccaccagcagcgtcaagaccacggtcctcgccgcgccgaccaccaaggccagcgccggcggcttcgaggcggccaccgagggcggcgg

SEQ ID NO: 2225 - DNA, 233 bp, Zea mays
  misc_feature: Incyte ID No: 700160259H1
  unsure 220: a, t, c, g, or other
gttggaataatcctatttttttcctcttgggaacgcaaccagcacacgttcatcaggagtgtttctgtttggcctggctatctgtttcggtttggatacatacagatagcttaccttcttggttcatcaggagtgcaaagttgcaggatctcaggcggcgctgacgatgacgcagcagccctggagccttccacggccgagcaaggacgagtaggaaggngggccacatgcgt

SEQ ID NO: 2226 - DNA, 233 bp, Zea mays
  misc_feature: Incyte ID No: 700160260H1
  unsure 24: a, t, c, g, or other
atcgcttggacacctctgcaaggnagcacatggctctcgagaaggccaaggagatcatcgcgtcctccccggtcgacctagctctccgaaaggccaaggagaccgtcgcctcccaccccgtcgtcgtcttcagcaaaacttactgccctttctgcacccgagtgaaacaattgctagcaaagttgggggcaagttacaaggctattgagttggatgtggaaagtgatggcgct

SEQ ID NO: 2227 - DNA, 235 bp, Zea mays
  misc_feature: Incyte ID No: 700160262H1
  unsure 8, 87, 116, 121, 124, 127, 131, 142, 154, 156, 171: a, t, c, g, or other
caaaccanccaaaagccacccccagaaaccggcggtccttgagtgttccggatctgagccagcagctgagaagaggatgagcgccgnggccgccatggcgacgtcgtcgctgaacnccaangcnccnctcntcatcccggcngcgtaccgacangnggatgaattctcgcncgagtggtatgagctcgtcaacaccaccgcctggttccgggaccactggttccgccagcaccaa

SEQ ID NO: 2228 - DNA, 237 bp, Zea mays
  misc_feature: Incyte ID No: 700160263H1
  unsure 27, 74, 105, 181-182, 207, 209: a, t, c, g, or other
tcttaaccctgcgtgggtctgcgaggnctgcacaataagttcgacggtacccacgttcttaaccttaagaacgngggtacccacgttcttaacccttttccaganaaaaaataaaaaatacaaaaatgaaaaattagacacacataatatcacatgcaacacaatatatcacatacaatanngatttcaaacacattgatatatgtncntatcacaaattcacacaagtccaaatat

SEQ ID NO: 2229 - DNA, 239 bp, Zea mays
  misc_feature: Incyte ID No: 700160264H1
  unsure 75, 204: a, t, c, g, or other
cgtcccatggccgtcgccgccgtgtactatcgcttcagctggcaaatggagggcggcgaggtgccggtgatcganacgctgggcacgttcgcgctctccgtcggggcggcggtcgggatggagttctgggcgcggtgggcgcaccgggcgctgtggcacgcctccctgtggcacacgcacgagtcgcaccaccggccgcgcganggccccttcgagctcaacgacgtgttcgccatcgt

SEQ ID NO: 2230 - DNA, 235 bp, Zea mays
  misc_feature: Incyte ID No: 700160266H1
  unsure 211, 223, 230: a, t, c, g, or other
cgcctcccgtgtcctccgactccgacagggaaaggcgaaaccttgggtcggctcgctagtggagtgcagggtacgttgatgacggagctgtggatggaggtgctgccgccgccctacttcgcggggcatgcggcgggcgggtggttcctgccggaccggcgggccgggcccggggcgtggacgctggaggagaacaagatgttcgagcgcncgctggcgaggntcgactnggacg

SEQ ID NO: 2231 - DNA, 234 bp, Zea mays
  misc_feature: Incyte ID No: 700160267H1
  unsure 69-88, 145: a, t, c, g, or other
atccccattcccatcccgagacaggagaaggcaaggatgctgctcctgagctcccccttcgtgtccgtnnnnnnnnnnnnnnnnnnnntcagctcccatggcgctcgcccggcgctgcggatcgaggcggccaggcagctgacgnggcgggtggtgacgaccaaggcggacaagacggtcggggtggaggtggtgcgcctggctccacaccccaagtacaagcgccgggagcgc

SEQ ID NO: 2232 - DNA, 234 bp, Zea mays
  misc_feature: Incyte ID No: 700160268H1
gatttcgcaaaagcaacaaaacccacgtcgagggtagaagaggcctgcaaatttccgaagagctcgcggaaatggcgacggtgctgccgcttgccgccgcctcggcctcgcccacgccgaggacttgcatctccggcggcccagttcccgcgcgattccttgggactcgcatgcgtctccgcatccacatcccaccgcggggcgttgcctgcgccctccgaagagacccaccaa

SEQ ID NO: 2233 - DNA, 232 bp, Zea mays
  misc_feature: Incyte ID No: 700160269H1
gcatcttccaatgttcccctccatcttggaaagactgaaaattctgatgaattgcgagacaaacattttggcatcagacttcagccaccaattggcccagagcgagtcgatgaattgggtcactggacaggaagatctattgaggtgtctggggcaagctgggatgtcaacagtatggacattgctgtttctggccttggatggtactccttgggccttaaaggcactgcca

SEQ ID NO: 2234 - DNA, 232 bp, Zea mays
  misc_feature: Incyte ID No: 700160270H1
  unsure 85, 111: a, t, c, g, or other
cccgtatgaaagcctctggcagtgggtctgcccttttcttgtgagctttccttttaattgtactatttggttgtataagattgtngcctgcccaaatttcaggcacatganatataacaattctcaaccatgttcgtctgtgtgaagtggcttgtagctttaggggaagaattaagttaaaacagaatattgcactttaagttcttatatatatctaagagttcatgactcc

SEQ ID NO: 2235 - DNA, 230 bp, Zea mays
  misc_feature: Incyte ID No: 700160273H1
caatttggagcacaagattaagctgtcagggaatggagcacatagcagtgcttgctatgatgtgctcgtggatgttcctttcccgctgcagaaagagatgatggcgttccttgccaacacagagaagcacaaggacattgaggcttgcgacgaggtgatatctgcttcgatcaagaagatccatgagcaccgcaggaggagggcattcttcctgggtttcagccagtccc

SEQ ID NO: 2236 - DNA, 163 bp, Zea mays
  misc_feature: Incyte ID No: 700160274H1
  unsure 68: a, t, c, g, or other
cggacgctggcaacgttcactccagaggtaaaccatctcacgtagtcactcacatccatgtacacaantgtacaaagctggattcaaagatgtaagaccttatccagcaggttatctataggctttgtttgggagcaataataaggctatcttcagcggatct

SEQ ID NO: 2237 - DNA, 230 bp, Zea mays
  misc_feature: Incyte ID No: 700160275H1
gcaagttattttactttgcaggtatggagacaacatcagtccttcttacttggacacttattgtgctaagcatgcacccagaatggcaagagagagcaagagaagaggttttgagccactttggaagaaccacaccggattatgatagcttgagccgcctcaagactataaccatgattctacatgaggtccttaggttgtacccaccggcaacctttctaacaagaaga

SEQ ID NO: 2238 - DNA, 228 bp, Zea mays
  misc_feature: Incyte ID No: 700160276H1
  unsure 51: a, t, c, g, or other
cgtcgacgaccccatgttcgtggaggccaccaggttcaactccgagcgcancgcctcgcgcagagcttcgactacaactacggcgacttcatccccgtcctgcgccccttcctgcgcggctacctcgccaggtgcaaggacctgcaggccaggcggctcgccttcttcaacagcaactacgtcgagaagaggaggaaggtcatggacgcgccgggggacaagggcaag

SEQ ID NO: 2239 - DNA, 231 bp, Zea mays
  misc_feature: Incyte ID No: 700160277H1
  unsure 31, 181, 187, 193, 198, 200, 204, 211, 216-218, 224, 226, 228-230: a, t, c, g, or other
gacaacaacaagaacaaggcaggtggcaagnagtaggaggcagtggcgcgccgccacctctgtacgattaatcgatgccttgagcttgtaacttgttcgcatccttgtaggtgcgatgcttgttgggtcataaactctgatgatatcgagatttggtgatcagaataatgcgtggttttcnaaaaanaaaaanaaaananaaanaaaaaanaaaannncaacananannnc

SEQ ID NO: 2240 - DNA, 233 bp, Zea mays
  misc_feature: Incyte ID No: 700160281H1
  unsure 54: a, t, c, g, or other
ggaagagtgccttgggatatattcagctcagaagtgaaaagattacacaaaganagaataggtgctccatattttagggagcctggcgaattcccaaagctagaagagtctttctttgcaaatcccttgcctggctgtatatgtgagcaacatagtgaagaatgaagatgcaggtgtgctgatggttcttaacccacgcctctgaagtcagaaaaatataggcctcttactgc

SEQ ID NO: 2241 - DNA, 228 bp, Zea mays
  misc_feature: Incyte ID No: 700160283H1
atcaaaacttaataatgatcaccaatttgctgtgtctttaggtcccaaataaccaggatgttgtcataaatttaagcatcataagcttatattgtttatttcattgtgttatagttatactcattgttttatcaagttctcctatgccttctggtggaaaggtagtgtaatggattaattaatgttttttttttgcagaaccactgttttcagccactcccagactgt

SEQ ID NO: 2242 - DNA, 226 bp, Zea mays
  misc_feature: Incyte ID No: 700160285H1
tccctcccgacccactcgcccaaaaccgtagcgccctcgcctgctcgccgccgccgtcgttgcgagctccccatcttcctccgttaaccatggcgacccagatcagcaagaagaagaagttcgtcagcgacggcgtgttctacgccgagctcaatgagatgctgacgcgggagtcgcggaggacggctactccggcgtggaggtgcgtgtcacaccgatgcgcacg

SEQ ID NO: 2243 - DNA, 226 bp, Zea mays
  misc_feature: Incyte ID No: 700160286H1
  unsure 113: a, t, c, g, or other
agcaaacttaacacattttgtccaactggaagatcgtttgctgcagcgaccactgatggtgttttattgtactcagttgatgaatcatttatttttgatccaacggacctcgncatcgacgttacgcctgagaaagtagaggaagctcttgcagaaaaccaacaacaaagagcccttatacttagccttcggttaaatgaggatttattgattaagaagtgcatat

SEQ ID NO: 2244 - DNA, 225 bp, Zea mays
  misc_feature: Incyte ID No: 700160291H1
  unsure 33-34, 148: a, t, c, g, or other
taaaaacagacccacttcctctgatcctcttcnncccacccaccgtgggttcgtccagccttccggccttcccccccggtggtcatcacatctcccccaattcgccgccccctccgacctcgccgtactcctctcgctccgttgaagnagcctcttcatctgctcgccgcagttcgtccgttgcccatggcggatgaggaggtaactgatccaaaggcgttccta

SEQ ID NO: 2245 - DNA, 223 bp, Zea mays
  misc_feature: Incyte ID No: 700160292H1
cagcactagcggcatgacggtggcgctgctcgtcctaggctccctgttcgcggtgtttgcgggagccaaggataacgctgcggtggctgcggtgagtgtggtggccgtcatggcgttcgtgatggccttctccgtcggcttgggccctctggcgtgggtgtacagctccgagatactgccgctccgacttcgcgggcagggtgccgggctcggcaccgccatg

SEQ ID NO: 2246 - DNA, 225 bp, Zea mays
  misc_feature: Incyte ID No: 700160293H1
  unsure 65-66, 68: a, t, c, g, or other
gttggattgggttcaaagttgggcttttggacagctgtggtgtgcacggcagctctgtgacttgnnangaggaagggaggaagaaagcggatccatggcgtcgaagcggatcctcaaggagctcaaggacctgcagaaggatcctcccacctcttgcagcgcaggccctgttgccgaagatatgttctactggcaggcgacgattatggggccatcagatagccc

SEQ ID NO: 2247 - DNA, 229 bp, Zea mays
  misc_feature: Incyte ID No: 700160296H1
  unsure 2, 106-152: a, t, c, g, or other
angcaaacaaggccaaatgattatgatttcattcatttcgttgtcaaggttcatcttccccacaaattttcatcgcaaagtttcattgcgttttctccgagatgannnnnnnnnnnnnnnnnnnnnnnnnnnnnnnnnnnnnnnnnnnnnnntgggtgaaatctgagttgtcagtcatctacatgtctttcttggttgatagacttattctcagtcgcctgtttatctg

SEQ ID NO: 2248 - DNA, 281 bp, Zea mays
  misc_feature: Incyte ID No: 700160301H1
  unsure 7, 12, 68-69: a, t, c, g, or other
cggacgntggtntatagcatttatagtctggtcgcaaaggtccagcaatttgacagtgagaagagtanncatgtcacattatggcatgcgatgtgaatgacggaagtcatcagcagcaccagaagcgccatcgcatggtttgcttgttggtctgtttaattgctgtactttacgtaacagagatcacactagattaaatgatgttttggttattttatttatgctgcagcagttttggcgactacttgtattctttttgtaacggtatgggtggtgacgat

SEQ ID NO: 2249 - DNA, 285 bp, Zea mays
  misc_feature: Incyte ID No: 700160304H1
  unsure 100: a, t, c, g, or other
cgagtcgtggcgacggcatccaagcaaggaaaagaaataaagcggaaaactttaaacgggtacgcaggagatccagcgaaatggcggcgccgccgccgtncatatccagcggccttgaagccggagatcggccctgacggcctcgctcgagattctcccgtaatcgcctacaccgagaaggtcattttggaggagcagctgcagctgaagaaatacattcaggagaactattccaaaattcgtgatgtagaaaaggagttagagagtcttactttagaaatgaaa

SEQ ID NO: 2250 - DNA, 284 bp, Zea mays
  misc_feature: Incyte ID No: 700160306H1
ggagaagcctgacatccacacgaagctgatggagaggtacagcgaaatcccagcatggtggttctactcgttgatggcgctatcaattgtagtgtcccttctcctctgtaccgtgctgaagcgtgaggtacagctcccatggtggggcctcatcttcgcatgtggcatggcattcgtcttcacacttcccatcagcatcatcactgcgacgaccaaccagacgccaggtctgaatgtgatcactgagtatgctatgggtctaattatgccgggctctcctatcg

SEQ ID NO: 2251 - DNA, 284 bp, Zea mays
  misc_feature: Incyte ID No: 700160312H1
acgcagtaaaaagtaaaaagtatatgtatataaaaaggtcagaacggcataccaattttggaatgaaaagggagtactaacctaaaattgcttagctgctttagttcgagaagctcaatggaaaattgcaaactacttaaaatctaaaaggattagatttgaaggtaaattccactaaccgaagccagtagttttgttgcttcctatatctctgaaatctttctactgttctgtgaaaagctgaagcactcatgctgtctctattccgtgcgtgcttctatgtt

SEQ ID NO: 2252 - DNA, 285 bp, Zea mays
  misc_feature: Incyte ID No: 700160313H1
gttccattggccgcgtcgttgccatcacgccgacgactaaactagtcgatcacaccaagctcacaggctctcgatcgcctgtgatcgggctgccctgccgcctcttgctcccttcctcctctcgcccagcagcctagctacttgagcgagacgagctccagctgaggaagtgagaggtcgtggtccgagaggcgtgcgtgcgtggccatggacggcgccgaggacgacgggacggagtggatgatgcatggtgccggagggaagggaaaaggcggcggcgcgctc

SEQ ID NO: 2253 - DNA, 285 bp, Zea mays
  misc_feature: Incyte ID No: 700160314H1
  unsure 165: a, t, c, g, or other
ccgtgctgtcggccgagtccgtgcccgttgccgcctacgtcgccgacgccatgaagcaggacgtcgccgcgggcttcgtcgcgctgcaggtcaaggtggacggccgcgtcaagtggaaggtcggcagctgggtctccggcagctaccacctcttcgtcagctgcnccgccgtgctctccgcgggctaccccggcgtcaacaacaccgtgtcgtcgctcaagttcgcccagcccacaggatgcagcgtcgaggtgtgatgagtttgtgaccaaacaagtgccctgc

SEQ ID NO: 2254 - DNA, 288 bp, Zea mays
  misc_feature: Incyte ID No: 700160316H1
catttctctgttcattgctaccaatatctgcgagaatatcatctggaaggcatttagccccacaaccatcaacagtggtcgtggtgctgaatttgaaggggctgtcattgcactgtttcatctgttgattacgagaaccgataaagtccgtgctcttcgtgaggctttctaccgccagaaccttccaaatgtgaccaatttgcttgccacagtcttggtcttcctcatagttatctatttccaaggcttccgtgttgtgcttccagtgagatcaaagaatgctcgtgg

SEQ ID NO: 2255 - DNA, 175 bp, Zea mays
  misc_feature: Incyte ID No: 700160318H1
  unsure 45: a, t, c, g, or other
gaacgtactgcccaggtttacttaatacttgctgctttttgacgntactgtacatattgttcgacaatttatttcttggcagttcaattcgtccatttagaatttctaggggcacgagagcatgtgttaccctggagatcaatttcatgctgctttttgtaattgatcatgctgc

SEQ ID NO: 2256 - DNA, 276 bp, Zea mays
  misc_feature: Incyte ID No: 700160319H1
  unsure 19, 132: a, t, c, g, or other
ccgcgccgcgccgcttgangccgccacggcgtgcgcgggcgtctacggcaacggcgcgtaccccggctacgccgccagctgctcgtggacgcggccacgggtgccagctacaacgccaacggggcgcgcggnaggaagtacctgctccccgcgctgtacgatcccgacacggctgcctgcaccaccttggtttgagcaaacgcgcggcgccgtgttttggcatctgtcaccgtagtgggcggggatacagtgaatgataatgcgcttgtgttaggc

SEQ ID NO: 2257 - DNA, 275 bp, Zea mays
  misc_feature: Incyte ID No: 700160323H1
ctctctccgacaagaacccgaacgagagcaaacacgcgtccaacgcatcgccagcccagcccagccccgtagtaggaacgactcgcaagccaagcagcagtaaccctagaataacggcggccccgggcatggggatggcgaaggtgctgctgctgctcgtcctcttcatccaaatcatcaacgtgctcaccatctctgcgtctgcgaggccgttcaaggcggaagcgggacgacgatccagatggtggtggacatgttgttcggcgacaagaagc

SEQ ID NO: 2258 - DNA, 57 bp, Zea mays
  misc_feature: Incyte ID No: 700160324H1
gttgtttttgtgtgcgtgttatatctatatatactggttgacaaactagtttggttg

SEQ ID NO: 2259 - DNA, 260 bp, Zea mays
  misc_feature: Incyte ID No: 700160325H1
  unsure 14, 17: a, t, c, g, or other
atgagccacctcangangagggcgatgatcaagggggagatgacaatgatcaagacaaggaaaactgagccctcgcgtttaggcggggaattatgtgacccgtttgggggattttttttggttgtttgacttagctggaactcaacttagggaactgtttagtgccttatgaagtcaaccaacttgaaaggagactgctatatcataatctcggtatatctatcaacgcagtttgacctgtgattcagtttgtttgtgct

SEQ ID NO: 2260 - DNA, 278 bp, Zea mays
  misc_feature: Incyte ID No: 700160326H1
  unsure 268, 273: a, t, c, g, or other
gtcacagagatgggactacagataagagagatgatgtacgaaaagattaagatcaataaaataatgtcgagaattactggaaaatctgaggagcagattgatgaagacacgaagtttgattatttcatgagtccttcggaagccaaggattatgggatagttgacaatatcatagatgaggggaaaccagggttggtagctcccttggcaggatctgttccgcctcccaaatcgcgtgtgtggtacttgtggaaggcttcggggccgnccagnaatat

SEQ ID NO: 2261 - DNA, 278 bp, Zea mays
  misc_feature: Incyte ID No: 700160327H1
atgaagactgcttaaatttgattgctcggcttccaccagtggcttcttatgtttaccggagaattttcaaggatgggaaatcaatagaagctgataattctctggattatgcggcgaatttatcacatatgcttggttttgacgaccccaggatgctggagctgatgcggctccatgtaacaattcacgctgatcatgaaggcgggaatatcagttctcatactggtcatctggttggaagtgctctgtcagatccttatctttctttcgcatcatct

SEQ ID NO: 2262 - DNA, 280 bp, Zea mays
  misc_feature: Incyte ID No: 700160329H1
cctgtacatagcatagcatagcgtatgctacacatcccctcccggaaaaagcgtgggaccgaaacacatcggaggttccaacgccaaccgatcttgttcgagctccggccttactgctgcacagcctgatagctggagcggctggaagggaagactgggatggcgccgaaatcgccgggccttataccgccctggtgatgtccatggtccctcctcgctctcgacttctccacccgggttctccggaacacttcttggatttgccggtcgttctccttca

SEQ ID NO: 2263 - DNA, 278 bp, Zea mays
  misc_feature: Incyte ID No: 700160330H1
gcatgcacaaactgcctggtggctcaaaagtccgaggatcaaaatggccagagttatggccgcaaaggcttgagaagacccctttctggattgatggttccaaggttggtgtctatggaaagcctgcaaatgaagattttgaggcagataatgcccactggaaacgggttgtaagtaaatcgtatgtgaatggcatgggaattgactggtccaaagtgagaaatgtcatggacatgagagctgtctatggaggttttgctgcactctgagggaccaaa

SEQ ID NO: 2264 - DNA, 280 bp, Zea mays
  misc_feature: Incyte ID No: 700160331H1
ggcggcgctctcggagaccctgcgcctgtacccgtccgttcccgaggactccaagcacgtcgtggccgacgactacctccccgacggcacgttcgtcccggcggggtcgtcggtgacctactccatctactcggccgggcgcatgaagacggtgtggggggaggactgcctcgagttccgccccgagcggtggttgtccgccgacggcacccggttcgagccgcacgactcgtaccggttcgtggcgttcaacgccgggccgaggatctgcctcggtaag

SEQ ID NO: 2265 - DNA, 70 bp, Zea mays
  misc_feature: Incyte ID No: 700160333H1
  unsure 40: a, t, c, g, or other
cacgttgatgaaattaatgctcatggttttgttgtaaganattaatgtggccaaagtgatctagatgtat

SEQ ID NO: 2266 - DNA, 273 bp, Zea mays
  misc_feature: Incyte ID No: 700160334H1
gggacttgcgtcagagaggtgcaatacaaactcttcccgacaaataccagatcacagccgttagcttctcagaggcagcagataaggtattcactggtggcctggacaacgatgtcaagtggtgggatcttcgcaagaatgaaacgacagaatatctcaaaggacatcaggacatgatcactgggatgcagcttagccctgatgggtcttacctcctgaccaatgcaatggacaatgagctcaagatctgggatctgcgcccttacgcaccag

SEQ ID NO: 2267 - DNA, 268 bp, Zea mays
  misc_feature: Incyte ID No: 700160335H1
  unsure 220, 224-225, 240-242, 244-247, 250, 252-256, 259, 261-263, 267: a, t, c, g, or other
atcgagagtcgatcatatatgcatgtttgtacgtgtttgtgtcataataaatcgatcgatcatgttgtttaccctttttatttcggtatgtagttgcatctgcgggcgggctaaaataaatcacggcaggctgggcttcatcaagcccatgtatccagctgtgtgtaataatgcaatggaaaacgaaccaaaaagaatgcttccattccagcaaaaaaanaaannagagggagagagagnnngnnnngangnnnnnagngnnngagnc

SEQ ID NO: 2268 - DNA, 270 bp, Zea mays
  misc_feature: Incyte ID No: 700160336H1
cttcgcttacatcaggctccgcgagcaggagatcaggaacctgatgtggatctctgaatgtgtcgctcagaaccagaagtcccgggtccatgacagtgtcgtcttcatattctgagaacccccgccactatatatgtatgtacaaaatgcctgctttgatgatggcacaatcgctcgacaattataaatctgggacttattattattcccattccctctgttagacgccggcgtaaaaaatgccagacctggagttgatgtattatttgt

SEQ ID NO: 2269 - DNA, 269 bp, Zea mays
  misc_feature: Incyte ID No: 700160337H1
  unsure 74: a, t, c, g, or other
actcggcgtcggacgaggcggagattgcgcctgagggtcggtcatctttgcctatcgtattagatgtcccatcnggggaatggaaggcgtcgtgcgcgtactgtagcggaggcgtaatcatgctgttgcggctggatatgactgatgtcttgtttagccactgttgctcctgccgccgcgacgtggggtaggtatgcgcattaaaagcgagtgtcccccacctgtttttgggtgcttttgtcttatctgcctgggattagcttgggcga

SEQ ID NO: 2270 - DNA, 270 bp, Zea mays
  misc_feature: Incyte ID No: 700160338H1
  unsure 17, 19, 73, 154: a, t, c, g, or other
gcccaaggaagcgaagnanagagaccgagagggagaagcgtttctcctgggttgttcgggtgagccgctagcnagagcgaggacggagcgaggctttgccgctgcagagcagagcgacatgagctaccggcttggaggcgcggcggaccgcgangagggggacgaggagctgttcgagacggcgccgtccgccaacgggttcaggacggcccacggccccaattcagaacgggtaccaccagtgaggctgtagcctgtaggcagacgacg

SEQ ID NO: 2271 - DNA, 250 bp, Zea mays
  misc_feature: Incyte ID No: 700160339H1
  unsure 22, 76: a, t, c, g, or other
cggagctaccgcgtggtgagtnggaggctcagggacgtggctgtctacagcttcatctctaccgaccctgtcgttnagtgatcaggattcgaaaatgacccaaagtcgtgcacgaaaaccagatggcattggcattggcattgctgcttgcagacagcatctcagctatgggttacagttacagacttattataactctccttccgctattttatctccaagaagacgcacttcttggaattattaactg

SEQ ID NO: 2272 - DNA, 270 bp, Zea mays
  misc_feature: Incyte ID No: 700160340H1
gaaggaagtggccggtgcggtggtggccatactgctggttctgcagctcatggcagctccaccgacggccatggccgcccgctcgccgcgcggagccgtgccggatggctccctcgccacgacgcccaaggtgacgatgctgtcggccacgctgtgctacacgggggagacatgcaaatacactccctgcttcactcctgcttgctcctgcagctttagtgatcgcctctgctacgtcatatttactcctgttgcttgagttgaggccat

SEQ ID NO: 2273 - DNA, 271 bp, Zea mays
  misc_feature: Incyte ID No: 700160342H1
gtcaaatctaccgagggtgaaggcgacgacgattactcgtatgaagtttctttagacgaggacttcttgacttcattggaatacggaatgccaccggcatcaggaatgggcctcggtatcgaccggttaataatgcttttgacgaactcttctagcataagggacgttattgcctttcctgtcttgaagattcagcaatagatccccttcattctgtgaagaggcgtggctgctgaagaaaacaccagcagccttccttttgtgcttggtt

SEQ ID NO: 2274 - DNA, 272 bp, Zea mays
  misc_feature: Incyte ID No: 700160343H1
tggttctgttggacacaatgaagccatccagatatgctattaaaaatcctgctagtcattatggctttaaactgtaccatgtctgttctattttcagctaggcagagcatgttcaatttacagcaggccagcagacaccagacagtaaggtgatgtatgagtcaattatcaggatggaaatgttttttgcagctttctcagtgaatcagtatcaccgcagaacctttttggacacccagacgtcgagagatgcccattcctgaggaatatca

SEQ ID NO: 2275 - DNA, 274 bp, Zea mays
  misc_feature: Incyte ID No: 700160344H1
  unsure 17: a, t, c, g, or other
acggcaccccctcctcncgcccccttatgcaagcgggcaatcagaactccgatcacccgcacgccggcacgccagtgtcgtcttcgcaaccatgaactccatcgagcctttcaaccggctggtgaggctggcggcccgcgccttctacgacgacgtctccatgaagggcgacaaccagcccaagacttcccgcggggacaaccgcggcatggccgtcgtcgtcctggacgcgctcaccagacgaccgtgggttcgggaggaagatttggctaaa

SEQ ID NO: 2276 - DNA, 257 bp, Zea mays
  misc_feature: Incyte ID No: 700160346H1
  unsure 197: a, t, c, g, or other
gagatctgctccacccatagctgcagttgtggctgcacgtacttgttgagctgttgtgttgtgtccatctcggtactttttgatttgttattagctgtggtgatgatgcatgggctgccctgtcatctgcagctctagcatacactcactactacgtgtgcgtgttgtaccgttttgttttgagtggtgacttgaangtggcgctggtgatttgtactaccttctctctatatatactccttggtacgcaaaataac

SEQ ID NO: 2277 - DNA, 275 bp, Zea mays
  misc_feature: Incyte ID No: 700160347H1
atagccaatgccatgaggtggaagacaagattggctgatcatgagggtggccctcatgtacctgagaagatactcttcgcggtcaagcaatactggactgctgaaaaaacaagcagctaacgttgttcattttcatttttttctccagtcacagctaacttgccccctggctgtgtttattggaaaaatttctgtcgattatacagcccatgtttgttactgaaaatataaaacaacccccttgagggggagtaaattatgtgggatttagctgt

SEQ ID NO: 2278 - DNA, 277 bp, Zea mays
  misc_feature: Incyte ID No: 700160348H1
  unsure 19: a, t, c, g, or other
caagttcaaggtgcccgcnggccccgccgccgagtactccgaccgcgcgtacaccatctacgccacggtggagcttccccggaactccacgcagcagttcacggtgtggcaggccggcccggcgaccagcaacggtggcatctcccctcacccgacggcgccggccaacttggccagcacccagcggctggacttcctctccggctccagcaccgccgcgtcaaactccaagttcaccgccgtaacatccacgggatgtgaacgcgattgcgtgggg

SEQ ID NO: 2279 - DNA, 243 bp, Zea mays
  misc_feature: Incyte ID No: 700160349H1
  unsure 218: a, t, c, g, or other
ctgtttactttggaacctcagttcctacaatatttagaggtttaacgactgaagagatacaacaatgcttttggagaggttgttagaggcaaaaagcctggagcggcaagcgtcgaagaataataggtacatcgaagaaatatagaggagctaacaaaacggatggatagccctaaatgagatgctgacccaataagtcgccgaatcacctccagttntaacccaatttttgaggcgacatga

SEQ ID NO: 2280 - DNA, 240 bp, Zea mays
  misc_feature: Incyte ID No: 700160350H1
  unsure 202: a, t, c, g, or other
ggatctctgtatggatgatgaacgtagaaagtgacccacttgacagccatactataagcaagtctgagttgcaattaattctagctggaagagctggatctaaagtccaaggcagtaataaattcccatcccttagggaattgttctcaaggactgaattcttggctgtcactttggccaatgtggtcaacaactggggctnttttgtcctattgtcgtggatgcctgtgtacttcaaaa

SEQ ID NO: 2281 - DNA, 242 bp, Zea mays
  misc_feature: Incyte ID No: 700160351H1
  unsure 85, 162: a, t, c, g, or other
ggcacggagtggacagtggaccagcttccggccgtgggacgcgtacacgtcggacacgtccatcgacatagggaagcaccacgcnccgacgacgctgcccgacaaggcggcgtacctgatcgtcaagtcgctgcgcgtgcccatggacctcttcttccagcnccggcacgccagccacgcgctgctgctcgagacggtggcggccgtgccgggcatggtgggcggcatgctcctccacctgc

SEQ ID NO: 2282 - DNA, 241 bp, Zea mays
  misc_feature: Incyte ID No: 700160353H1
  unsure 14, 146: a, t, c, g, or other
ccgccacgctaganaggaagagcgcgcggagagcgagagcccgggagaaacagcggccggcggcaaaatggtgcagcggctcacctaccggaagcgccacagctacgccacaaaatccaatcagacccgcgtggtcaagacccctngtgggaggcttgtgtaccagtacaccaagaagcgcgcgagggaaccgaaatgcccggtcaccgggaagaagatccaaggaattccacacctgaga

SEQ ID NO: 2283 - DNA, 239 bp, Zea mays
  misc_feature: Incyte ID No: 700160355H1
  unsure 236: a, t, c, g, or other
gccggtgacgctctccgtcggcggcttcggctccggctactcgctcccgtccacgcaggcggcgctggacctgttcgactacctctggaacgccttcctcggcgggtcgaagccaggcgtgcgccgccccttcggcgacgcgtggctcgacggcgtcgacctgttcctggagcgcggctcgcccgccgaccgctacgacgtgctggcgctcgagctcgccaagcacaacatccgcngcg

SEQ ID NO: 2284 - DNA, 241 bp, Zea mays
  misc_feature: Incyte ID No: 700160356H1
gcatcacatatggcgatggcgagcagatcctccacgaccggaacggcggtgctgtgctttcttgtggtggtctccctcttcctggccccgtcgttgttcgttgccggaactgaagcagcagcggcctacggtgcaggtgcaggtgcaggcaggaagatgaagcaggcagctgcgggagctgtggcgacgaagcaggatggctacggctaccctgcaaccagttcaccagcgggatacccgg

SEQ ID NO: 2285 - DNA, 243 bp, Zea mays
  misc_feature: Incyte ID No: 700160357H1
aggcaccacacctcttcctcctcttcctcctcctagcacagctagcgcctgctccccttcgtctgtgatcatgtcttgcagcagcggcaagtgcaactgcggctccagctgctcctgcggcagctcatgcaactgcatgtcccctgacgtggagaccgccgccgccagcagcatcaagaccatggtcctcgctgcgccgaccaccaaggccagcgccggcggcttcgaggcggccaccgaggg

SEQ ID NO: 2286 - DNA, 240 bp, Zea mays
  misc_feature: Incyte ID No: 700160358H1
gcaaatccgagcagtttgcaaaagcagagacacctggaagtgataagatacggaattatgatacccttgttaagtataaagtacttactggacattctcatcgtgataggtggctcgataaattgatagaaagtattccgcttgcatcaaaggagaatgctggaacatctgctgatgctaattctacagccaaaagttcaatcagtggttcacctgcaaaggatgttggttctgctgaaa

SEQ ID NO: 2287 - DNA, 240 bp, Zea mays
  misc_feature: Incyte ID No: 700160359H1
cgctgaacaaccagcgctggagctggctggaggagtgggtcggctcgcagcccttcgacaaggacgtccccgtggcgcaccagtccccgtacacccgcagcgccagcaggggtgagcacgacgacgtcgtcgaccggctcggctgctcggcccgccgctccttcgcccggccgacgcgcacgccgccgaggggggactgctacggcgacgcggcgcagttcccggggtacatggcctcca

SEQ ID NO: 2288 - DNA, 240 bp, Zea mays
  misc_feature: Incyte ID No: 700160360H1
  unsure 2, 76: a, t, c, g, or other
cngccgcaccgctgaagcctaaactcgcagccagccatgtcgatgagaatcgagcgtgatctccacatggccacanggaacggagaaactagctacacaaaaaattctaggattcaagagaaagctatgtttcagatgaagtcggtacttgaggaggccactagagcagtatgcacagctctcctcccacaaaccatggttgtggccgacttaggctgctcatcagggcctaacacactg

SEQ ID NO: 2289 - DNA, 126 bp, Zea mays
  misc_feature: Incyte ID No: 700160361H1
  unsure 25-27, 29, 61, 84, 102, 111, 113, 123: a, t, c, g, or other
gctaattctacttctacttcggaannncngccgctcccggcgcctcggattatcaactacngcagaggtcgcggcggcaggatnggtggtccagcgtgcganggcggcggngnctaccgtgcnggg

SEQ ID NO: 2290 - DNA, 240 bp, Zea mays
  misc_feature: Incyte ID No: 700160364H1
  unsure 111, 139: a, t, c, g, or other
gccttgagcaagggcgcggcagggcaatgccccctccggagaagcgctctaaagcgtcgttctttggccggagccgcctccgtggggaggcaggccccgagctcgccggtngccggcgctcgtgcgacaccgacccgcntttctccctggacgcctcgcgcatgtccatcgatgacgccggcttctcgtgggacgagccccgcgcgtcgtgggacgggtacctgtttggcgccggcaccg

SEQ ID NO: 2291 - DNA, 236 bp, Zea mays
  misc_feature: Incyte ID No: 700160366H1
cacttgatgatattacaaagacactgccagtcattgaggtggctgatgacgactttgtgccttttgtccatgaaaacccaagctttgcgtttttattgcaaagaggggagtagtccatttttcctcaccatggtgacttcacccacctgtggataagtcaggattcctgcctaggatgtacagtacgcgtgattctttttgtaccaggtagcaaggcattaaagattagatgctag

SEQ ID NO: 2292 - DNA, 237 bp, Zea mays
  misc_feature: Incyte ID No: 700160367H1
accgcatcagggagaaataccctgacagaatccctgtcattgttgagaaggccgagaggagtgacatcccagacattgacaagaaaaagtaccttgttcctgccgacctcacagtcggacagtttgtgtatgtggtacggaagcggatcaagctcagcgctgagaaggcaatcttcatcttcgtaaagaacaccctcccaccaacagctgctctgatgtccgccatctacgaggaga

SEQ ID NO: 2293 - DNA, 158 bp, Zea mays
  misc_feature: Incyte ID No: 700160368H1
  unsure 51: a, t, c, g, or other
gtgaggcttgacgacacatacgaagttaagatattagatatggtgattttngccaaactggcgacttgaaatggatgtatattttgttctgtaacgtgtccaccatagaacatattttgtaacaatgccctcgtttgcaataaagctttttgttgctt

SEQ ID NO: 2294 - DNA, 236 bp, Zea mays
  misc_feature: Incyte ID No: 700160371H1
aagagggaaaactggaaaaggcacagcaaaccgagaaaatggcggctcggcgtgggcgagagtgggacggggacgagcagggcgcggcgctgccaacgccggcgcccctcggcgcgccggtcgtctgccttctcagctccgccggagacctagccgccggcgccttcgtaggctccctcgtcggatagggaaaaggtttgatcacaaaccaaggcacgaaggcttgtcttagcatt

SEQ ID NO: 2295 - DNA, 238 bp, Zea mays
  misc_feature: Incyte ID No: 700160372H1
  unsure 73, 192: a, t, c, g, or other
gagacgaaggcggcactcggtgttcttcacgctcgacatgctggacaagttcctcgccctggcgctgccgganggcgcgaccaaggaccacccgttcacttgccccatgggtccgcaggcgccgccgctcgagtccgtgccgctgccgccgatgctcgtgtccgtggccgagaacgatctcatccgcgacantaacctcgagtactgcgacgcgctgcgcgccgccggcaaggaagtg

SEQ ID NO: 2296 - DNA, 236 bp, Zea mays
  misc_feature: Incyte ID No: 700160374H1
gtcgcctctcccagtcccagatctcgttcactcgcactcgcgcaaccccgcggccccgcgcctaatggcatcctgtggcgccggcgacgccgcgtcaggcagccgagggccagtatctcgcacgtcatcttcgatatggacggccttctcctcgacacggagggcttctacacggaggtgcaggagaagatcctagcgaggtacgacaaggtgttcgactggtcgctcaaggccaa

SEQ ID NO: 2297 - DNA, 233 bp, Zea mays
  misc_feature: Incyte ID No: 700160375H1
atcggaaggtgatccattgctcgttctcgactgtgtataccggtgtctcacagtttgctttcttctgcggtcatgaattgaatgtgtctgaagttttattaagaataatagtgcttgctcaagctattggtatctactcgtttttttcttctttttttttgtttaactaaaacggttgaatctatgttgttgtggacttgtggtccttgtgaatggtttgcagtatggttgct

SEQ ID NO: 2298 - DNA, 161 bp, Zea mays
  misc_feature: Incyte ID No: 700160376H1
gtttagtaggcagatagtagggttggaagccaacccagagtgtaatgaacatttgagttacattttttggccttttttagcgtcacgatctactactggtaaaagggtctgtttcttgggaggatcttaccttcaagattgccagatatacattgaaacta

SEQ ID NO: 2299 - DNA, 232 bp, Zea mays
  misc_feature: Incyte ID No: 700160377H1
ctcgatttacatccctgagaatcttttttcccttgttttgtagagattcggatttgattatattaccctgattcgtttaaaaggatgggttgagctgtatttgcgcaacatattttgcgacagtgacttctcttcctaaaaattagggtcttgttccgtctaccacgatccattcttgctaagacggcattgaatgtttaatgtgcagcttatagtcagtgatggaacacaa

SEQ ID NO: 2300 - DNA, 234 bp, Zea mays
  misc_feature: Incyte ID No: 700160379H1
ggcattttaccttgttcaatcctgattcctggactgttctttgtgcctgaatccccaaggtggttggcaaaaatggggaagatggaggattttgaatattcattgcaagttctgagaggatttcagacagatatcacagcagaagtaaatgaaataaagagatcattagcatcatcgaggaggaggacaaccataaggttcgctgatatcaaacagaagagatacagtgttccc

SEQ ID NO: 2301 - DNA, 236 bp, Zea mays
  misc_feature: Incyte ID No: 700160380H1
gttaccgtaagcaggctccacgtcactatgtgttgcccgaggatgcgggtggcagcacttgggcgcctacgtcaacctgggctcgttctacctcgtcgggattccaacagcactcgtcctcggcttcgttctgaagatggaagggaaagggctttggatgggcatttcctgcggctccatagtgcagttcttgcttcttgccgtcataacgttcttcagcaactgggagaagatgt

SEQ ID NO: 2302 - DNA, 231 bp, Zea mays
  misc_feature: Incyte ID No: 700160381H1
  unsure 200, 203: a, t, c, g, or other
ttctgtgttccctgagatcatatttggtagagtggaattgtatcagccagtcgagagcttagttcccgaatctttttttaatcgtaacggaaaatttgtccgtcatccttctgatgagaggaactcattaaacaggcgaaataggtcttttttgcgctgggaaaagtttgcgcttgatgcataataatttttaggacggnaangctcttagagcgcaggttttgttcacct

SEQ ID NO: 2303 - DNA, 232 bp, Zea mays
  misc_feature: Incyte ID No: 700160382H1
  unsure 7, 9, 97, 207, 230: a, t, c, g, or other
gctcaancngcggggcctgttccagtccgacgccgcgctcatcaccgacgccgcctccaaggccgacatcctcagcgtgatcaacgcgccgcccgangtgttcttccaggtcttcgcgggctccatggtcaagatgggcgccatcgaggtcaagaccggctccgagggcgagatcaggaagcactgcgccctcgtcaacaagcactnggcggcggaattcatgcgggagntg

SEQ ID NO: 2304 - DNA, 231 bp, Zea mays
  misc_feature: Incyte ID No: 700160383H1
  unsure 27: a, t, c, g, or other
ggttcagcagcactcagggcgccgganaggtgggcggctacgtcgtgcagtacaagggcaaggagaagggcagcctcagcctggtcaccgtcagaggagccgggcacgaggtgcccagctaccagccaaggcgagcgctcgtgcttgtccagggtttccttgcaggcaaaacgcttcctgactgcaaaacgtgcgagtcagcttagcggttggcagcactacagcaacatg

SEQ ID NO: 2305 - DNA, 231 bp, Zea mays
  misc_feature: Incyte ID No: 700160385H1
ctgcttgtttctccgctttgcaagatgtcgtccccgagcaagcgccgcgagatggaccttatgaagctgatgatgagcgactacaaggtggagatggtgaacgacgggatgcaggaattcttcgtcgaattcaagggcccggccgaaagtatctaccaaggtggtgtctggaaggttcgggtagaactgcctgatgcatacccttacaaatccccgtccatcggcttcatc

SEQ ID NO: 2306 - DNA, 213 bp, Zea mays
  misc_feature: Incyte ID No: 700160386H1
  unsure 24-25, 27, 90: a, t, c, g, or other
gtgcacggcagctctgtgacttgnnangaggaaggtaggaagaaagcggatccatggcgtcgaagcggatcctcaaggagctcaaggaantgcagaaggatcctcccacctcttgcagcgcaggccctgttgccgaagatatgttctactggcaggcgacgatatggggcatcagatagccatacgctggtggcgtattttggtcactatcac

SEQ ID NO: 2307 - DNA, 231 bp, Zea mays
  misc_feature: Incyte ID No: 700160387H1
ggcaaagtatatgaataagaacccgaaacagaaggaaccagcacctggccttgtgttcttccacattccactaccagagttcagcagttttacggcatccaatttcacaggagtaaagcaggagggtatcagctcagcatcaattaactctgggttctttgcctccatggtggaggctggagatgtgagagctgcctttgtgggacatgatcacattaatgacttctgtgg

SEQ ID NO: 2308 - DNA, 60 bp, Zea mays
  misc_feature: Incyte ID No: 700160390H1
gttttgatggctactttgtgcttgttggaccagctataatcagaagattgaaattttctc

SEQ ID NO: 2309 - DNA, 229 bp, Zea mays
  misc_feature: Incyte ID No: 700160391H1
  unsure 12, 74, 118, 127, 178: a, t, c, g, or other
acggcgcgcggngaggaaggcggagtccggcggctgacggagggcgagtggatcgacacgatgcccagctggtncccggacgggagtctgatcgcgttctcgtcgaaccgtcacgacncggcgaacncggccgtgttcagcatctacctggtgcggcccgacggctccgggctgcgcngcgtgtacgtggccggggcggagggcagcgcggaggcggacaaggagcgga

SEQ ID NO: 2310 - DNA, 228 bp, Zea mays
  misc_feature: Incyte ID No: 700160393H1
actatactgatatggttaataaatactatgatcttgccactagcttctatgagtatggttggggtgaatccttccactttgctcacagatggaatggagaatccttacgtgaaagcatcaagcgacatgagcattttcttgccctgcaacttggtttgaaaccaggaatgaaggttttagatgtgggctgtggaataggtggaccactgagagaaattgcaagattta

SEQ ID NO: 2311 - DNA, 229 bp, Zea mays
  misc_feature: Incyte ID No: 700160394H1
gttcggagtccctctggcggcgtttcagctgaaccaagagaagctcgcccggatgctcggtaacgtccagtcgatggtcctcgtcggctggcgtctctgcaagctctacgagtcggggaaaatgacgccgggccacgctagcctagggaaggcttggaactccaggacggcccgcgaggtggtctcccttggccgagagctgctgggtgggaacgggattttggccgac

SEQ ID NO: 2312 - DNA, 233 bp, Zea mays
  misc_feature: Incyte ID No: 700160396H1
ttgcatcccagtcccagccaaagcaggatgccgcacgccaagacggactcggaggtgacgagcctggcgccgtcgtcgcctccgcggtcgcctccacggacccgcggcgccgtctactacgtgcagagcccgtcccgcgactcgcacgacggcgagacgatcaaggcggccacgtctgtgcactccacccccgcgctgagccccatggcgtcgccgcgccactcgcactccca

SEQ ID NO: 2313 - DNA, 265 bp, Zea mays
  misc_feature: Incyte ID No: 700160401H1
  unsure 48: a, t, c, g, or other
ggaatgtttgctcttcgtgagagaagggtgcacgttacccaggagagncttcgagatggcagtggccaaggtgatgaagaaaggtcacggagaagaacatgtccctgcgcaagcttctggaagtgaggctcgtgcccacctttcacggcctccccgaagctagtggcagtgccttcatatccatatcttttaccaaagcagtggaatggtgtaacggcatgctctggacaatgttatctcaagttgcgccgcgcatgcttatgtt

SEQ ID NO: 2314 - DNA, 258 bp, Zea mays
  misc_feature: Incyte ID No: 700160404H1
  unsure 6, 41, 43, 46-48, 67, 82, 84, 113, 205: a, t, c, g, or other
attgangcgtcattggagcgacgccatggagtaaggctgcngngcnnngcggggcggggcgcctgcntcggcagcgcgcagnancgaaacgacgacaacgtgaagggcacgangcacggccccagtcgaccagtcagaggaggaaggatgcgagggacggagagatgctggggaggggaagccagagatgatggagccgcaaggnagggggagaagagatgacgcgtgggggagtgttgccggctgctaactggggac

SEQ ID NO: 2315 - DNA, 258 bp, Zea mays
  misc_feature: Incyte ID No: 700160405H1
cagcacgcctcctcctctttcagcaaacacagctagctagcagcacctgctcccttcgcctgtaatcatggcgtattgctgcgacgacggctgcaactgcccccctgactgcgggtgcccatgcgactgctgcaatttgtaccctgaagtggagaccgccgccgccagcggcatcctcgctgcgccgaccaccaaggccagcgccggcggctgcaacacctgcaagtgcggcggcaccagctgcaactgcaactgcag

SEQ ID NO: 2316 - DNA, 258 bp, Zea mays
  misc_feature: Incyte ID No: 700160406H1
atgagttcaacatctggacttcagtgaactcatgaattgaactggagaggtcacatagtgttcatactgtgggaactcgcaaccagctcatctgggcatggattccctcagtggtgaacatgtgaagatggggtggtctttttgtgctccggtatgagaggaaggaaaacaaaatcttagtctaacctaccatgttgatatgagcttacaggagaataatctcttcgatatgaatgactggagagcaatttggaggca

SEQ ID NO: 2317 - DNA, 258 bp, Zea mays
  misc_feature: Incyte ID No: 700160407H1
gtggaggaacgagcagttctgggtcatcggaggcgtttcggcgcatctgttcgcggtgttccagggcctgctgaaggtgttcgccggcatcgacacgagcttcaccgtgacgtcgaaggccggggacgacgaggagttctcggagctgtacacgttcaagtggaccaccctgctgatacccccgaccacgctcctcctgctgaacttcatcggggtggtggccgggatctcgaacgcgatcaacaacgggtacgagtc

SEQ ID NO: 2318 - DNA, 260 bp, Zea mays
  misc_feature: Incyte ID No: 700160408H1
atattttttagagacggcattaaaatggatctggttctcaaacatggcatgactaggcattggagcgttgttgagcagcagccatggctatattactctaggcttacaattttgctgtagctgttacacagcaaggagtccacttggtaaacattggtagctaccaaaacaaccctatctcatggtgtaacaattttgtagttttacatttgtgtcatctttttgtaacaaactgatgtatcaaaacaccatattgccag

SEQ ID NO: 2319 - DNA, 261 bp, Zea mays
  misc_feature: Incyte ID No: 700160410H1
cacacatgtaccgttacatgctctcccagaggaagaaggcgctatcaaaggccaaagcggcgtgatgatgccgcgcaagcaagggaatcggtggactggtttgcgtgatggatgtcggaacgtgttcaagttttcgacatccccagtagaatctagtggtcgggggatatatattactagaatggggctcttcatatgaactgccccgtatgcgtaatgtgttgtaccggagtcatcatttcagatatcagctgttgcgtg

SEQ ID NO: 2320 - DNA, 261 bp, Zea mays
  misc_feature: Incyte ID No: 700160411H1
acttggctgtcttctatgacacatatcgcccttgaagggggatgctttgtgctgtcagcgtgccagttctgtcgtagaaagaactaccctccccctcccgagtacacattttgtggcctagaggaagagccatccccggaatccgttgtttgttctggagggagtgtcatcatctcaccattgggaacagtgttggcgggtcccaactacgaaagtgaggcccttctcactgctgacctggaccttggagagattgttcga

SEQ ID NO: 2321 - DNA, 265 bp, Zea mays
  misc_feature: Incyte ID No: 700160414H1
gcggcgaggagcgtgtcatggtgttcaccatgcgcgggggcaaggacgccgtggacgccgcggtggtgcgcccgggccggctggacgtgcacatccagttcacgctctgcgacttcgaggccttcaaggcgctggccagcaactacctggggctcaaggaccacaagctgtacccgcagtggaggaggggttccacgccgccggcgcccgcctcagcccggccgagcttggcgagatcatgctggccaaccgcgcgtccccgagc

SEQ ID NO: 2322 - DNA, 266 bp, Zea mays
  misc_feature: Incyte ID No: 700160415H1
gcgccgggagatagcggaccgttctacgacaagaaggaggccgccaagctcgccgcgcaggccgccgccctagctgctgccccgctcccggtccgcgggcccccgccatcccaggatgccggcagctcccgcgcactagctcggcctcggctatggatgtggagatgtctgatgcagggaacaacaggtctaagaccttcttgaggccacttggcagcattagcaagaagaaggtgcagcttcatttgaagatcaagaaagacaag

SEQ ID NO: 2323 - DNA, 257 bp, Zea mays
  misc_feature: Incyte ID No: 700160417H1
  unsure 49, 57, 150-166: a, t, c, g, or other
ggacgattcgccccttcatataaacaactgaaatcgtcacacgagacangaagatanaaaaaagataataaacctttgtcaccatacgagacaagaagatcaacctgctaatttttttcgcaactggataagtaaaatctttattataannnnnnnnnnnnnnnnngtaccacatgttttaaaaattgtcatgaatatagctccactgtatctatgacactagaggaagaagaccatgaataatgaatttcactcgc

SEQ ID NO: 2324 - DNA, 255 bp, Zea mays
  misc_feature: Incyte ID No: 700160418H1
  unsure 215: a, t, c, g, or other
tcccgctccagtgcagagacacggcgacgcaaatcccagctccaggacctatcgccttcgctccggctctgcctccactgccacccatcccaccggaatcgtccgaccctccggcggatcccacggcgatccctccggcggtggactcgccgccgttctcccagaggccagtggtggtgcccagctcggcagttaggaggtcgcacgtatccgtngcggctgtcgccgctgtgctgcccatagttgctgccgcgt

SEQ ID NO: 2325 - DNA, 253 bp, Zea mays
  misc_feature: Incyte ID No: 700160419H1
aggcagcccttatcctgctatgcctggtatgcagtatcctggatcatatcccggtggtcccatgggcaaccgtcatttgggaaattctcacaatccgattaaagctccaaattcgaatgccaattccactgtttcttctagtcccagcagcaatgctggtgggcaggttgaaggtcctcctggagccaacctatttatttatcatatcccacaagaatacggtgaccaggagctttccagcgccttccagagt

SEQ ID NO: 2326 - DNA, 252 bp, Zea mays
  misc_feature: Incyte ID No: 700160420H1
gtgatgttttggatctcacctttagcatggatgcagacgaagagaaactgatattgtacgagaaggcagaggtcactgattgtgagttgattcctggagggcgtaacatcagggttactgaggagaacaagcatgaatatgtcgaccgggtagcagagcatcgattgaccactgccatcaggcctcagattaatgccttcctggaagggtttaatgaactcattccacgggagctgatatctatcttcaacg

SEQ ID NO: 2327 - DNA, 256 bp, Zea mays
  misc_feature: Incyte ID No: 700160423H1
  unsure 17: a, t, c, g, or other
gaagaaatctggcgcantgacactgatgagccctcagaatcggacgccaagtctgatgaagccatggaagccccagtggagcaggaagtggccccagcttccaccatggtaaagaaggaacagaaggagagtgcccggcacaggaacgtggtcagcaaggccccaccacccaaggcgatcctgaagaggaagaaggcgcagtcctactggtcatgggctggcccagctgccatggtggctgccgtgctggttgccc

SEQ ID NO: 2328 - DNA, 258 bp, Zea mays
  misc_feature: Incyte ID No: 700160424H1
gaaatgcagagagatttcagtgcaggatcagtacctgatgcgatcaagagaaaactagctgccgagaccagtgtgcctccacaacaatcaagtttcagctgtgtaactggacagaagcagccccaaaactggtaccccacaaagaaaaaggtgaaagttccacatcttccatcgcagattctgcagtgtcccagaccaaacgtggtgccatccttctggtgcaaaatctgcaaggtcgactgtgtcaccgagttcaat

SEQ ID NO: 2329 - DNA, 258 bp, Zea mays
  misc_feature: Incyte ID No: 700160426H1
  unsure 111-134: a, t, c, g, or other
cttttgtctaataattgaggcccatgataacttaagatctggcccaagactgttatccctgctagggttaatccactggctctcctatatagaagcgcggcgagagctcgnnnnnnnnnnnnnnnnnnnnnnnnatcacaggcctctcttccggtttccccccaaacccgtccgagaggcagtcatcccgccgcgatgagggccaagtggaagaagaagcggatgaggcggcttaagaggaagcgccgaaagatgagg

SEQ ID NO: 2330 - DNA, 205 bp, Zea mays
  misc_feature: Incyte ID No: 700160427H1
cccttatgtcagcatcatattcgagatcaaggagaaccaggcggcagagcattttcatgttcctctcttgcattcccctttctcgttcaccacttaccgtggaagctaagttttcaacttacgtgccattacctctgttgggatgttcgaagcaacttgtaaacttgacacttccgttgtgataataatctggttccatgtaaaa

SEQ ID NO: 2331 - DNA, 261 bp, Zea mays
  misc_feature: Incyte ID No: 700160430H1
ggggcaacggtgaaccagtgcatgtactaccaaggggtgaatctgggctcgtcgtccatggcaacggccatgaccaacttgatccccgccatcaccttcgtcatggcggcatcagtcggcctagagagggtggaggccaggaggccgaggagcctggccaagatcttcggcacggccgtctgcgtgagcggcgccatggccatggctttcttcaagggcccgaagctgctcggcgacggccccaacgctctccagctcctc

SEQ ID NO: 2332 - DNA, 265 bp, Zea mays
  misc_feature: Incyte ID No: 700160431H1
gtatggaagcctcctcgtcccctcgcctcccgtccccgcgccggcacgtcgcgcggcgctgtccgtcgtcgccaaggtcaaggtggccacgccccaggacgaccgcatcgcccgccacgtccgcctgcgcaagaaggtaagtggcaccactgagaggccgaggttgagtgttttccgctcaaacaaacatctgtacgctcaagtcatcgacgacacaaagcaatgtactctggcttcagcttcaaccatgcacaaatctctctcc

SEQ ID NO: 2333 - DNA, 251 bp, Zea mays
  misc_feature: Incyte ID No: 700160433H1
ccccgtccaccccgtcgacgccgaccccgacgccggcctcgttcggcaagtgtccccgcgacgcgctcaagctgggcgtgtgcgccaacgtgctgggcctgatcaaggccaaggtgggcgtgccgcccacggagccgtgctgcccgctgctgaagggactcgtcgacctcgaggccgccgtgggcctctgcaccgccatcaagggagaggtcctcggaatcaagctcaacctgcccgtcgacctcagcctc

SEQ ID NO: 2334 - DNA, 250 bp, Zea mays
  misc_feature: Incyte ID No: 700160434H1
catgagcgagttccaagtgatctgaagaagaatctcatgcaagcaaggctcgataagaagctgacacaggcacaacttgctcagatgataaatgagaagccacaggtgattcaggagtatgaatcaggcaaggcaatccccaaccagcagatcattagcaagctcgagagggccctgggaaccaagttgcgtggcaagaaatagctttcctacgagtttgtgtcccggagcatcataatagggggaagac

SEQ ID NO: 2335 - DNA, 248 bp, Zea mays
  misc_feature: Incyte ID No: 700160435H1
ggcagcagcacaagcaagaaccacacctcctcccttcgcctgtgatcatgtcgtcttgctgcggcggcaagtgcgggtgcggctccagctgctcctgcggcagggatgcaacggctgcggtatgtaccctgacgtggagaccgccgccaccagcagcgtcaagaccacggtcctcgccgcgccgaccaccaaggccagcgccggcggcttcgaggcggccaccgagggcggcggctgcgactgcaaca

SEQ ID NO: 2336 - DNA, 248 bp, Zea mays
  misc_feature: Incyte ID No: 700160436H1
gatgctcttctttcacatttgctcacccattgatcatgttacttctgaatgctgaatttaaataaattgaactgatttgttttgaatctggaccatggaatttgagttagaggccagtgcatggtagggcccttaaatattttcttttcaggtgtcagaacggcaatttgtaggttagctcaaagtgttctctagtcgagaaatggaaaagcagaaaatgagtaagccttaaagttttaaccattaat

SEQ ID NO: 2337 - DNA, 251 bp, Zea mays
  misc_feature: Incyte ID No: 700160441H1
  unsure 45-46, 137, 176, 179: a, t, c, g, or other
gcgtacgtagcacagtccattattgccgtctcccttttgcgtgannaagaaagagagtgagaagcagtcgccatgtctggcatcatccacaagatcgaggagaagctccacatggggggcgaccacaagaataaggnggaggagcaccacaagaaggccgaggagcaccacaaganggnggagggggagcaccacaagaaggacggcggggagcacaaggaaggcatcgtggagaagatcaaggacaagat

SEQ ID NO: 2338 - DNA, 215 bp, Zea mays
  misc_feature: Incyte ID No: 700160442H1
  unsure 44: a, t, c, g, or other
gaaggagcaggttttcatagggtgttcatatggtcccggtgtgnaactgcttttgttagacatccctcgggacataaatttagatttttatcttcaagcatgttgaaattcaactgaggcttgggtccgtcgaatctgccctatgatgatctgtaattacacacttcttttcccacactactggaagcatttgtggtaaggcaaattgtgaggtc

SEQ ID NO: 2339 - DNA, 228 bp, Zea mays
  misc_feature: Incyte ID No: 700160443H1
  unsure 123: a, t, c, g, or other
gcaacttgcagtaggtgttaacaggagctggctgagcttctcttgcttctgcaagtagtagctgtagccgcctgtgggcagagacgacgatttttacaggtaaaattatgtactttgcaaggngggaaacatgtgggaataagtagtgagcctacgtttagctctgtatataaagtgacttgattttatatgtactattacggctggtgaaacacgcttctttaattc

SEQ ID NO: 2340 - DNA, 169 bp, Zea mays
  misc_feature: Incyte ID No: 700160446H1
  unsure 26-27, 35, 161: a, t, c, g, or other
gcttctatatggcatcaaaaaaagannaaaaaganaagaacaaaaaaagatgatgattagttaggttcaagtttcattgagtgaaaagctagttttaaaggcaacattctggtggtgggtggtggtttcttttgtggaaaagaaagaagagactatatcanaaaaaaaa

SEQ ID NO: 2341 - DNA, 260 bp, Zea mays
  misc_feature: Incyte ID No: 700160447H1
ctgtacactgccggtgacaacaagacagcccatgactcgtacaatttcttggtgaactggctggagcggtttccacaatacaagcatcgcgatttctacatcacaggagagagctacgcaggccactacgtgcctcagttgtctcagctagtctaccggaacaacaaaggcatcgagaagccgatcctaaacttcaaaggcttcatggttggaaatgcggtaattgacgattaccacgacttcatcggcacattcgagta

SEQ ID NO: 2342 - DNA, 260 bp, Zea mays
  misc_feature: Incyte ID No: 700160448H1
gagaaccaccttgttctctgggatctccgcccccttggcttgactggaaacaaggtcgaaaagctatgtgatctttgccacatcacattgaacaagaatgctgtcttcggtgacagcagtgcattgtctccgggtggtgtccgcattggcgcgccacaatgacctcgaggggtctactggagaaggatttcgagcagattggggagttcctccaccaggcagtgaccatctgcctgaacatccagaaggagtacggcaag

SEQ ID NO: 2343 - DNA, 242 bp, Zea mays
  misc_feature: Incyte ID No: 700160452H1
  unsure 12, 120: a, t, c, g, or other
acgatgcaaggnatgattttgagaagatgattaccattgacaaatcatcagaacaggacgctacagccgcactccttaaacttaagcagaaggaacaggaagccgaaaagaaggcgaggnagcagttcaaaggactctttgacaagaagccaggagagatatccgaagttggtgtagaatcagatggtggaaaggatgcaggtgatgcaagaggcaacggtggtgaggcaacgagtgctgat

SEQ ID NO: 2344 - DNA, 238 bp, Zea mays
  misc_feature: Incyte ID No: 700160453H1
gcagtttatccgatacatgatctcatcaaatattggggaggtggtttgtatttttgtggcggcagtgcttgggatgcctgacacacttatacctgtccagctactctgggtgaaccttgttactgatggattacctgcaactgcaattggtttcaataagcctgatggcaacatcatgtcagtcaagcctcgaaaggttaatgaagctgtggttagtggatggctctttttccgttat

SEQ ID NO: 2345 - DNA, 238 bp, Zea mays
  misc_feature: Incyte ID No: 700160454H1
cagcaatagctcctcgtctgcaaccacgatactactcaatttcatcatctccaaagatggctccctccagaattcatgtaacatgtgcgttagtttatgggccttcaccaacaggaaggatccaccaaggagtttgttcaacatggatgaagaatacaattcctctggaatatagcgaagaatgcagctgggctcccatctttgtgaggcagtcaaatttcaagttacctgctgatcc

SEQ ID NO: 2346 - DNA, 237 bp, Zea mays
  misc_feature: Incyte ID No: 700160455H1
  unsure 207: a, t, c, g, or other
ctttcaaatgttcttgcctcattagaagataatctaagtgatgctccaagagccactgagtaccttggacgacttcttgcaaggtttgtggaggaaagcatattgctcttgcaagaggtaggtaaattgattcaagaaagtggagaagaaccagggtacctaatacaaggcggtattgcggctgacatcctaggtgcagtcctggantccataaaatcagacaaagggaattcattc

SEQ ID NO: 2347 - DNA, 170 bp, Zea mays
  misc_feature: Incyte ID No: 700160456H1
cgtgactatatatatgtatgatattaagacgagatttgataagggtggcatagcaagtcctgatattctgtgtgcattcagaatagctgcttttatgcccttgtgttgatattttgcaaaccaaaacaaactgttctgaaacgagggcacatattgttcatgaataaaaa

SEQ ID NO: 2348 - DNA, 234 bp, Zea mays
  misc_feature: Incyte ID No: 700160459H1
cggagtacaacaaggcccgcctcgtgtccctcgagctccccgaccgcagtggcgacataatcatcacaacttatggggagattgacaagaacaattatctggaccccaggactgcgcaagttgctactatagatcatacgaaacagacttgtacgaaactgaggcccgctgaagatgaggagcttccatcggcttacattgaagagtttaggtagactacctgtgcgtctttcc

SEQ ID NO: 2349 - DNA, 233 bp, Zea mays
  misc_feature: Incyte ID No: 700160460H1
  unsure 43, 58-59: a, t, c, g, or other
gtaatctactagacgtgaagctgaatggttttacacttagtantgtttgcttatatgnnaggacaggtggaggcacaactgatcatggagcaatcagatcggagctgcacttgccattttgtgctcaatgtgaacaccatcttctgcccttctacggagtagttcacattgggtactttggcaatggaagcggagaaggcattgatcggtcgcattttcaggcgttggttcat

SEQ ID NO: 2350 - DNA, 233 bp, Zea mays
  misc_feature: Incyte ID No: 700160461H1
aggcgatgaaggttgaaccataggatgaccggcaaggtttctgaatttcttgtagatccatgtttcgacaaagacaaagcttgctactgttttactagtgtttcgacaaagtttaagtttgccattgtgttttactagtgtttcctgcggatccatgtttcgataaagacaaagcttgacattgtgtttccatagacactcaaattcacatattttagtaattcctgatgagc

SEQ ID NO: 2351 - DNA, 235 bp, Zea mays
  misc_feature: Incyte ID No: 700160462H1
  unsure 117: a, t, c, g, or other
cgcaaggcaaactcgctccccagcgctcctccttaattaatcccttgcatgccttccagccgcgctcgcgcctcatcagggacggcggcggcggccatggacccgtggatcgcgcancttccctcagcctcgacctcaaggtcggcctccccacgccggccaaggtcgtcttggtcgaggagaccaacaatttcttggccgtcagcaggacgaaagaccgggaggtggaggcgct

SEQ ID NO: 2352 - DNA, 163 bp, Zea mays
  misc_feature: Incyte ID No: 700160465H1
  unsure 162: a, t, c, g, or other
ccaagatcaactgatcgatggaaccatagtggaggtagctcgctcgttggatggcagcgtacgtggccatcagcagcatgcagtcgtcgtcgtagcagagatgtcctagctacgtgtgtgtcatgcatcagactggcacataataaagaagtagatcatgcnc

SEQ ID NO: 2353 - DNA, 171 bp, Zea mays
  misc_feature: Incyte ID No: 700160466H1
  unsure 76: a, t, c, g, or other
caccgacaacctcaccatacttcagcagaagttcagcaacctcagcctcaacgatgtcgacctggtcgccctttcnggggggcacacgttcggccgggtccaatgcaagttcatcacggaccggctctacaacttcagcgggacgaacatgcccgacccgacgctggacgc

SEQ ID NO: 2354 - DNA, 237 bp, Zea mays
  misc_feature: Incyte ID No: 700160467H1
  unsure 54, 192: a, t, c, g, or other
ggatggctgtgcagaaacaacattactgtccagaaatgtacaatggtttcaagntgatgcttgcagaatgtgtccgcacaatggttctgccccatctcatgcacaagcaaaatgacagctttttcagagagcttgtgaaaatgtggtcaaactattgcatcatgattagatgtgtaattggcttcttcagcnatttggaccgctgctatgtgaagcagtacaaactaccatcgctta

SEQ ID NO: 2355 - DNA, 233 bp, Zea mays
  misc_feature: Incyte ID No: 700160468H1
tgtctctgctggcagaaccccatttacttctgggattgggcttgaaactcttggcgttgagacagataaagctggcaggatccttgttgataagcgcttcatgaccaatgtgaagggagtctatgcaattggggatgcgatccctggtcccatgcttgcccataaagctgaagaggatggtgtcgcttgcgtagagttcattgctggaaaggaaggccatgttgactatgaca

SEQ ID NO: 2356 - DNA, 200 bp, Zea mays
  misc_feature: Incyte ID No: 700160471H1
  unsure 9, 60: a, t, c, g, or other
gtattaggngccctgggcttccatcaatgcagggagcccctaccaggctaggtgtgccgngcgcgggtcgacgtggcaggtggtcggagtaccgcgcacatgcaccgagtgaaggtgggtcgtacgtgcgcacccactattaccatttatgcatccgtttcactcgaattccgtatgcataaacgcgtaactgccacggt

SEQ ID NO: 2357 - DNA, 167 bp, Zea mays
  misc_feature: Incyte ID No: 700160472H1
  unsure 35, 39, 99-100: a, t, c, g, or other
aacgaggccaccagctcaccgccgagcggaagcgncgcngagcaaccaacccctctcctcgtccgccgccgtctccccggaccatgtccatggccgccnncctcccggctgctctgggcgtcccgcgccgccgcctacctcaagatctccaccttccccagggcctt

SEQ ID NO: 2358 - DNA, 229 bp, Zea mays
  misc_feature: Incyte ID No: 700160474H1
  unsure 100: a, t, c, g, or other
ggcctgagccttgttgaggatgacgccaacacgttgtaaacctcacctgtgggctaaacagctctctggtctcttctcctcctccgtgtcaacgcaagancaccacccacctcgccaggcttttttgggtttaatttgtgttctcagccctgatgtttagtctgctagcactctgtgggtgctgttgtcgcaagatcaccaccatgtcaattatttccgtgcccttgtc

SEQ ID NO: 2359 - DNA, 154 bp, Zea mays
  misc_feature: Incyte ID No: 700160478H1
ggcagtccggctggcaggagagaattggcgagggattgggatcgggagcgaattcccagccagcccctgtctagagagggacaggccgcgcgcgcacgcacgccaccgcgttccattggccgcgtcgttgccatcacgccgacgaataaactag

SEQ ID NO: 2360 - DNA, 237 bp, Zea mays
  misc_feature: Incyte ID No: 700160480H1
cttccctaacctcaaggttctgaatttgtcatgatcagggctatctggtgggtaacccaatcacgggcgaaagtatagatttcacttccagagtgccctacgctcatggagtcggtatcatatcagatcaattgtatgagacgatattggggcattgccaaggagaggactacactagtcctgcaaacgctctgtgtgctcaggctctggacactttcaacaatctcatcaacgaag

SEQ ID NO: 2361 - DNA, 155 bp, Zea mays
  misc_feature: Incyte ID No: 700160481H1
  unsure 55, 69: a, t, c, g, or other
ggatacatcttcaaatgggtggttcttgtatcagggcttttttgtgcctttatanttgtctccattgtngcttacgcacgacacaaggggctcgtcggatcctgaatagctgaaataaccgcgtacttgcttccctcaactgtaaatttgagcca

SEQ ID NO: 2362 - DNA, 234 bp, Zea mays
  misc_feature: Incyte ID No: 700160482H1
gcaactgcaaagcagcaagctctactcttcttctgtactgaacgtgtgactagataacaataagcgtgaaccatggcggacgagtacggccgcagcggctacggcaggtccggcgccggcgacgactacgacagcggctacaacagcaagtccggcactgatgactacggccgtggcgaaggtggctacaacaagtcgggcggcgatgacgactacggccgcagcggcggcgat

SEQ ID NO: 2363 - DNA, 231 bp, Zea mays
  misc_feature: Incyte ID No: 700160483H1
agtggtaaccacgagagggattggcctggcaccggttcattctacggcaacctcgactccggcggagaatgcggcgtccctgcccaaaccgtgttctacactccggctgagaaccgcgcaaagttctggtacgcaacggactacggcatgttcaggttctgcgtcgctcacacggaggaggactggaggcccgggaccgagcagtacaggttcatcgagcggtgcctgtcg

SEQ ID NO: 2364 - DNA, 230 bp, Zea mays
  misc_feature: Incyte ID No: 700160484H1
ccaactacaagccgtggtgggtgcgcaagttcacgcccctgctcaggaagctctccaactacgacgtcatcgacttcggcaaggacgacgaggtgcactgcttccgggcaggccacctcgggatgtaccgcgaccgcgatctcatcatctcccctcaccccacgcgcaacccgcgcaactactccatggttgactacaaccgcttcctccgccgcgccttcaacctgccg

SEQ ID NO: 2365 - DNA, 105 bp, Zea mays
  misc_feature: Incyte ID No: 700160486H1
  unsure 48: a, t, c, g, or other
gatgactatgcgtagtgtatcctctatggcagtataactagaacattngatttatttgttactggtaatgctgagatatagtactgtgcagattctgagttaaaa

SEQ ID NO: 2366 - DNA, 159 bp, Zea mays
  misc_feature: Incyte ID No: 700160487H1
gcatgcgggtaccagaacgccgtcgaccagccgcctttcgcgtccatgatcgccgccggtagcccgtccatcttcctgaacggcaagggctgcggctcctgctaccaggtgaaatgcaccggccacgcgtcgtgctccggcagcccggtgacggtggtc

SEQ ID NO: 2367 - DNA, 226 bp, Zea mays
  misc_feature: Incyte ID No: 700160489H1
  unsure 94: a, t, c, g, or other
atcaatccgagctcggatggatctgcgttgcacgcgggtacagcaccgccagcgaggatgacgacgacggcagcgagatggtttctgggcgatngcgcgaggccgcggcggtgcttcgggcgaggaacgcggtggcggggagcaggacgcggcggcacggcaaccggtggcgttatttgggcatggctccatggatctagcaaccagcgagccggacagccctcac

SEQ ID NO: 2368 - DNA, 136 bp, Zea mays
  misc_feature: Incyte ID No: 700160490H1
  unsure 33, 43, 45, 109: a, t, c, g, or other
cgacgtgctgctcaacgactggtggcacaagancacctacgancnggccgccgggctcgcgtccgcgccgctcgtctgggtcggggagccgcagtcgctgctcatcaanggccgcggcaggttcgtcaactgctcc

SEQ ID NO: 2369 - DNA, 223 bp, Zea mays
  misc_feature: Incyte ID No: 700160492H1
  unsure 109, 222: a, t, c, g, or other
gctgctctagctctagccctagctagtagctagccactcggtcgtgtagtcatcagccttctgatcgtcacccatggccactgccgaggtccagaccccgaccgtcgtngcgaccgaggaagcgccggtggtggagaccccggctccggccgccgccgtgcccgaggaggctgctcccgccgccgaggccaaggtggaggagccagctgccccggcggaganc

SEQ ID NO: 2370 - DNA, 180 bp, Zea mays
  misc_feature: Incyte ID No: 700160493H1
  unsure 72-94, 158: a, t, c, g, or other
tcgatggcgatgatgaagaagaagggcggcgccgcaacaacagcggtggcagcagtggcgttggtcctgctnnnnnnnnnnnnnnnnnnnnnnnacgtgaactgcgcggacgtggacgcaagcctgcgcccctgcgtcggctacgtgacgggcaaggnggcggccccggccgcgagtgct

SEQ ID NO: 2371 - DNA, 147 bp, Zea mays
  misc_feature: Incyte ID No: 700160494H1
cttcatcgagaagatcttcagcagtcagagctcgttgtgtactaatgttcccccatgttctgtttctcgttctgattctgcaattcgtcatattgttgaatttaatggttatgtggaatcgctaaaaagacatggtcatccgtaaaa

SEQ ID NO: 2372 - DNA, 256 bp, Zea mays
  misc_feature: Incyte ID No: 700160501H1
  unsure 214: a, t, c, g, or other
ctctcgatcatcaacaagtacgccgtgacaaagttcggtttcccaggcctcctgaccgctctacagtactcgacatccgctgctggtgtctggatcctcggaaagctaggcttcctcacacatgaccccttcaacctggagaccgcaaagaagttcgcgccggcggctctcgtcttctacctagccatattcaccaacacgaacctcctctgcnacgccaagtcgacaccttcatagtcttcagatccctgacccc

SEQ ID NO: 2373 - DNA, 276 bp, Zea mays
  misc_feature: Incyte ID No: 700160503H1
  unsure 203: a, t, c, g, or other
tgctgttatgtctggtttccgctggtccatgactcagattcttctccagaaagaggaatacggattaaagaatccttttaccttgatgagccatgttaccccggtgatggcaatagtaacagcaattatttccattgtgatggatccatggcacgacttcagagcaagtcacttttttgatagttctgctcacataataagangcagcttgttgctgcttttaggtggcgctttggcctttttcatggttttgacagaatatgtccttgtttctgt

SEQ ID NO: 2374 - DNA, 274 bp, Zea mays
  misc_feature: Incyte ID No: 700160504H1
gtcgtcgtcgactcgtcgtcgtcggtgttgctccgatgggcaaggactcgaagccgaaggacgccaaggggaagggcaagcaggcggccggctcctctggcggcgacgacggcggcggcaagggaggcaagggcaagggcaagggcaagggcggcaagtccgctgacggactcggcacttgcacctacgtcaaagctaggcacgtattgtgtgagaagcaggggaagatcaatgaacttataagaagttgcaggatggatggctgaataatggg

SEQ ID NO: 2375 - DNA, 271 bp, Zea mays
  misc_feature: Incyte ID No: 700160505H1
gccccaagccgggcgtcgagcgcgtcgctgtctccctcgacctctacaaccagggatccgcgactgcctatgatgtgtccattaatgacgactcttggccaacagaagtgtttgagcttgtcactggagagaaatcgaagacattggaaaggcttgaccctggtgccactgcttcacacacatatgtcctggagaccaaaacacagggcaggttccagggttcaccagctatcattacataccgtgttcccacaaagacagtcttcaggag

SEQ ID NO: 2376 - DNA, 273 bp, Zea mays
  misc_feature: Incyte ID No: 700160506H1
ggcacgaataaaatagggggtactatcttgccgacatcatccacccttcatgaccgatgttgatcaagggtatttgatgtgaccataccagcatcgccaatcttgccgaccattcctactggacctatcactcgaagccgagcaaaaaagatacaccaagaggtgcatgcgctactttatgaatttcaattaaacactaatgagaactttatgctacctacgtcgtgtatgttgatattgcttaggttcatcaaagaggaaggacaaaacata

SEQ ID NO: 2377 - DNA, 75 bp, Zea mays
  misc_feature: Incyte ID No: 700160509H1
  unsure 2: a, t, c, g, or other
anatgacgagatatgtattctgaagtagtaacttgcaaagatgaaaaaaaataccgttaccgttctcttcaagcc

SEQ ID NO: 2378 - DNA, 276 bp, Zea mays
  misc_feature: Incyte ID No: 700160510H1
tgaagaaacaaaagaagcatttgatgtagctcgtaacagcgtagaacttctttcaactgttctttcctcttctcctgagcaggatgctttgcaggatgacttgacaaccactcttgtgcaacaatgctaccaatctcagcacactatccagatgattattgagaccgttggagacaatgaagctgtgctctttgaggccttgagcgtgaacgatgagatccagaaagtattatcgaagtacgaggagatgaagcagcccagggcctccgagcatgc

SEQ ID NO: 2379 - DNA, 275 bp, Zea mays
  misc_feature: Incyte ID No: 700160511H1
atcagacacacagcaaatggagtccctgaagaactccctgcacttcataattgacactgcttccggtgaccatccatttgatccgtatttctctctccttaaggttggtggtgtgatgacattggtaggttttccaagtgagatcaaaatgcatcctgcaagccttatacttggtgcgcggaccttgtctggcagtgttgttggaggtataaaagacatccaagaaatggttaacttctgtgcagccaacaatatctatccggagattgagatca

SEQ ID NO: 2380 - DNA, 273 bp, Zea mays
  misc_feature: Incyte ID No: 700160513H1
  unsure 28: a, t, c, g, or other
gatttcgacgacgacgacctcgcctganggaactgccgcccggttcggtaacggatgttgttcgtggatcgcgaatcgtgttatgtcgataccgtgatggggtctcttaattagcgcatcgattcagactcgtttgggcaatctgaagatgtttagggatcaacattacctttgtggcctatggttcgtggatgcacatgcacagggatcaatataagtactttgtgccccatggttcgtggatcactgtgcatgtggtcttccgcgttttgg

SEQ ID NO: 2381 - DNA, 277 bp, Zea mays
  misc_feature: Incyte ID No: 700160514H1
  unsure 52: a, t, c, g, or other
ctagttcgcgctctggagaagctcatcgcagcgtcctccgcgcccgggactngctccgccctcaggccggtggcagtcgccggcggcctccgtggctacaacaccggcgctccgctccgacgctacgagggggccgagtcggaagacgatagcgtccgcgagtacgatgggcggcacggcggccgggactacgccgtgcccagcctgttctcagatattttccgtgatccgcttagtgcgccgcacagcattggccgcctgctgaacctgatggacg

SEQ ID NO: 2382 - DNA, 266 bp, Zea mays
  misc_feature: Incyte ID No: 700160515H1
  unsure 196-215: a, t, c, g, or other
ctgcaggattttttttttccaggctcacaccttggctacctgatcacagggagtttagcttatagatagcagggtaacagtcaccaccccccatctgtacattccccagtccctacataccttgcggagatgtatctggttagtaaatgatagatttgtcattgatttaatgtagtgaattttcccataggaatgnnnnnnnnnnnnnnnnnnnncatgtaaatgcagaacaatttcaatcttgaattcagtaatgtgttacaggc

SEQ ID NO: 2383 - DNA, 278 bp, Zea mays
  misc_feature: Incyte ID No: 700160516H1
tgccaattgtgctgagggagtgcggcgagacgtttcgtgggatcgactcgttggttgacgtcggtggtggccatggtggcgccgccgccaccatcgccgccgccttcccccacctcaagtgcagcgtgcttgacctcccgcacgttgtcgccggtgctccgtctgatggcaacgtgcagttcgtcgcaggcaatatgtttgagagtattccacctgcaaccgctgttttcctcaagaaaactctacatgactggggtgacgatgagtgtgtcaagata

SEQ ID NO: 2384 - DNA, 276 bp, Zea mays
  misc_feature: Incyte ID No: 700160517H1
  unsure 4, 6, 67-68: a, t, c, g, or other
cgcncngccgccgcagccgcaacaatgccgtcgcacaagaccttccggatcaagaagaagctggcanngaagatgcgccagaaccgccccatcccctactggatccgcatgcgcactgacaataccatcaggtacaacgccaagcgcaggcactggcgccgcaccaagctcggcttctgagcgtcgggattggccggctgctgcgtcggaaggctagggtctaagagctatcttccttctgttttatcaatgtgtcagtttttctgtaagctagca

SEQ ID NO: 2385 - DNA, 273 bp, Zea mays
  misc_feature: Incyte ID No: 700160518H1
cacggtatatgctacaatcagaatcaagtgcaatttactaggctgttacttttttactaatcaatttaagatggactgtggttgggaaccacaaaaacttcgcatgtcatgatgcagcttgagattggctttttgaagtactgctgaatgttgtcccatgctgtaacaatctagaattggggtgtcaagtgtggctctttccaagtgagaacagtaattgcgttgtgagtgagacagcgagatatgttatttgagcttaccctcttatgtaat

SEQ ID NO: 2386 - DNA, 271 bp, Zea mays
  misc_feature: Incyte ID No: 700160519H1
tggtcttctgttcatagtcagcagctcatttggagcattcctcctgctcatttacttggcgtttataacccctattgtgtatgacttctacaaccatgaaatggagtcaacactgtttgtcgatctttttttcaagttcatacagaacttggcgtttatgggtgccctgcttttcttccttgggatgaagaactcaattccaaaacgtcgctccaagggaaggacaacaaaaaccaagacaaactgatgtcagtggttgtaggaggggaag

SEQ ID NO: 2387 - DNA, 204 bp, Zea mays
  misc_feature: Incyte ID No: 700160520H1
acaaaatgcagctgtaagtttactgctgctctctaagtcgtgttcagtcatccagtgtgtctagtctagggaaaccccataaaaatggtgaaggtggaatcccatcccagtgtcataattaaggatgcacttcttctgtaagcaaatgtatgatgtacaatggccggccggcagtctaaatgttacaactagctcttcttggtg

SEQ ID NO: 2388 - DNA, 270 bp, Zea mays
  misc_feature: Incyte ID No: 700160521H1
  unsure 53-54: a, t, c, g, or other
ggactcctcgttctcgtcggcgtccacgaggcggacacggactccgacgccgnnctacatttgtcggaaggtcctgaacatgaggctgttttcaaatgacaagactggaaaagcatgggatcaaagtgttatgcagcgtaactttgaagtgctattggtcagtcagttcaccttatacggcatcctgaagggtaataagccagattttcacgtggctatgtcacctgcaaaagcgaaaccattctatgcttctctagttgagaaatttca

SEQ ID NO: 2389 - DNA, 270 bp, Zea mays
  misc_feature: Incyte ID No: 700160522H1
aaaagaaaaagaaaaggcaaaggcaaaggaatcccaatcaggcaagcaaaaaggaagaaccaggtgctgcggccggagatgtcgtcgcagctgatcgaggagcaccggtcgggcgcggaggtgcacgtcgggcacgagctgtgcgagcgcaagtcgcgcgagttcatggtggagctgggcctccccgacgggctcctcccgctgcccaggctcgacgaggtgggctacaaccggtcgacggggttcgtgtggctgcggcaggccgccggc

SEQ ID NO: 2390 - DNA, 270 bp, Zea mays
  misc_feature: Incyte ID No: 700160523H1
  unsure 14: a, t, c, g, or other
ctgtcgcatcacangcctctcttccggtttccccccaaacccgtccgagaggcagtcatcccgccgcgatgagggccaagtggaagaagaagcggatgaggcggcttaagaggaagcgccgaaagatgaggcagaggtccaagtaggcagattcatggagtgtccccgcctggagtctctctgcgttcggttgttgtttactgagtaattttagttttttttactaagacagtctgttatggatcagaaattctttgcgtttgtccgtgg

SEQ ID NO: 2391 - DNA, 274 bp, Zea mays
  misc_feature: Incyte ID No: 700160526H1
cgctccctcgctgcgccataaggctgcgactgcgagagccagccgcacccgcaccagtccataggccggcctcctctcttaccttcccacaccccttctcgaccgtacgtagcctagttgtgcttggtagccagccagaaggtcgtcggccgatgatgggaggaagaacagtggccccgccgctcgtcctcgcgctggtgaccatcatcgccatcgcggcggccgagggggacgaggtgaagtgtggcgggtgctctccgtgcggcggcgccga

SEQ ID NO: 2392 - DNA, 270 bp, Zea mays
  misc_feature: Incyte ID No: 700160528H1
catcgacaccatccgttcggccctgaccgtcatgatcgatgccggggcgaggacagtggtgatcacggggatgctaccgatcggctgcgagccgcagcagctggcccagttcgcaggcagcccggccggcgactacgaccctaccaccggctgcatcacgcggttcaaccagctcgccgagcaccacaaccacatgctgaggatgatgctgagggagctgcggaccaagtaccgcagcgcaggcccctcaccctccactacgccgacatt

SEQ ID NO: 2393 - DNA, 274 bp, Zea mays
  misc_feature: Incyte ID No: 700160529H1
gttgaaagagcaaggagtcgatgaagatgttgcaatggctgtagcagataacgagtaccggacagagaagaaggcaaagaagaaagcgtacaaggagctgaaagaaatcgcccgcagcgaagggaggaagccacctccgaatccatacccgagtgccataaaggaaatacaggcggaggaaaagaagtatgtcatggaccgtttgcataacccgaagtaatcgagattgcgaacaagatgaaggaggagcgagacaggatgttgagggattaga

SEQ ID NO: 2394 - DNA, 272 bp, Zea mays
  misc_feature: Incyte ID No: 700160530H1
  unsure 206, 256: a, t, c, g, or other
gaaccgcctcgtcgccgcgcggctccagttcgacgtcatgggcgtggagaccgtcctcgtcgcgcgcaccgacgccgtcgccgccacgctcatccagaccaacgtcgacgcgcgcgaccaccagttcatagtcggcgccaccaacccgggcctcaggggccagagcctcgcggccgtgctctcggccggcatgtcggcgggcaagngcggaagggagctccaggccatcgaggacgagtggctggccgcagcgcantcaagacttctccgag

SEQ ID NO: 2395 - DNA, 274 bp, Zea mays
  misc_feature: Incyte ID No: 700160531H1
ggaatggatgaagagtcggcctacaaaacactgtcgagggcataactgggatcatctcgaaaaccatctcaaagaaagggatgcttgaagtgtacaactctttgagcgaggaaggcaaaaaggagttcaacaaggcttatagcgcatcgttttacccatgcatggatatactctacgaatgctatgaagatgtggcctctggaagtgaaatccggagcgtggtgttggctatgcggaggttttatgagaaagagggcctcccagcttttccgat

SEQ ID NO: 2396 - DNA, 267 bp, Zea mays
  misc_feature: Incyte ID No: 700160534H1
cctctgtggtgaagatcattgagctggatgattagacaatcaggctatgctattgtctactagggcacgttttgccaattttttgcctaggccgaaacttattggctatgtataatcctatagcgcttgaaaactgagcagtttttcctatggtgccatcataggatttgcttttacagttccaattatggtgtagttcaaaaattgctcgactaaactgcggtgtaacagttaaatgggcagatggaataatgtaatcatactgtt

SEQ ID NO: 2397 - DNA, 264 bp, Zea mays
  misc_feature: Incyte ID No: 700160538H1
  unsure 54, 216: a, t, c, g, or other
gggcggagtgctcggagcagttggcggggctggcgacgtgcctgacgtacgtgncaggagcaggcgacggcgacggcgccgacgcccgactgctgcgcgggcctcaaggcggtgctgcagagcagccgcaagtgcctgtgcgtgctggtcaaggaccgggacgaccccaatctaggcctcaagctcaacgtcgacaaggcgctcggcctccccgcngtctgccacgcgcccgccaacatctccgactgccccaggctgctggac

SEQ ID NO: 2398 - DNA, 267 bp, Zea mays
  misc_feature: Incyte ID No: 700160542H1
cccaactgcccttttcggagatctcgccgcctccgccgtcgacttccgtcgcccccctatcccgcgtccgggcttacccgatggcacggctgcactggcttgaggccgtcctgccgctggggatcatcggcggcatgctctgcatcatgggcaacgcccagtatttcatccacaaggccgcgcacggcaggccgaagcacatcgggaacgatatgtgggacgtcgccatggagcgccgcgacaagaagctcgtggaacaatcctccg

SEQ ID NO: 2399 - DNA, 267 bp, Zea mays
  misc_feature: Incyte ID No: 700160543H1
  unsure 54: a, t, c, g, or other
ggaggtggtggatcctgacatggagttgaaaccagcgattcgtgctctgaagcntgctcttctagtggcactgcgatgtgtagacccagatgctgagaaaaggcccactatgggtcaggttgttcggatgctcgaggcagaagacgtgccttcacgggaggaccgccggagccggagaggccacagcagccacgcagacaacgagtccaaggcaagttcaagcgagtttgagataagcagtgaccgaagagagtcggggccgtcatc

SEQ ID NO: 2400 - DNA, 267 bp, Zea mays
  misc_feature: Incyte ID No: 700160544H1
acgcccgacaacccctgctgcgactggtacgacgtggactgcgacgccaccactggccgcgtcgtcggcctcgccgtgttccaggacgccaacctgacgggcaccatccccgacgccgtctcgggcctcgtccacctccagaacctcatgctgcaccacctcccgggcatctccgggcccatcccgccggccatcggcaggctctctaacctctccttcctcaccatctcctggacgggcgtctccggccccgtgccgtcgttcctg

SEQ ID NO: 2401 - DNA, 267 bp, Zea mays
  misc_feature: Incyte ID No: 700160546H1
aagatactaaggacaagatcactaagctattggaggaatacaacactggtggtgacctaggagaagcctgcagatgcatccgtgatcttgggatgcccttctttaaccatgaggtggtaaagaaggcactggtcatggcgatggagaagcagaatgacaccagcatcttggtcctgctgcaggagtgtttcggcgaggggctcataaccatcaaccagatgaccaaaggctttgcccgtgtcaaggaaggccttgatgatctgatcc

SEQ ID NO: 2402 - DNA, 214 bp, Zea mays
  misc_feature: Incyte ID No: 700160548H1
  unsure 27: a, t, c, g, or other
tctacggtgctgagtcctttgccgatntcttcccggcgaagagcgccaccagccttttgcataaatcatcgggtatacatccatcttcatttagtagatccgcccctgctgaaaacgcactcgatggcgtccgcgacggggggttcctcctcggagatggcggtggaccacgcgacggggctgggcacgtggagaagccgcggtttgatgctct

SEQ ID NO: 2403 - DNA, 256 bp, Zea mays
  misc_feature: Incyte ID No: 700160549H1
gaaaaccgtcaaaggacgagcacaacttggggtggaggcgtttgcggaagctcttcttgttatacccaagactttggctgagaactctggtttagatactcaagatgtgattgtttctctccagaatgagcatgaccgtggattagttgtggggttgaaccatcactctggggatccgattgatccccagatggaaggcatcttcgacaactactctgtgaagcgccagatcatcaattctggacccatcattgca

SEQ ID NO: 2404 - DNA, 215 bp, Zea mays
  misc_feature: Incyte ID No: 700160550H1
cgataactgtacaatactccgtgttagctgttattagcctatctgacattgcaatatacaagaggtgatgtcctcctgacccgtgaaaaaaggattttagttagggtcatgtgagtgtgtgatgtgtaaatgtaaaagaaaccagaatcagcaatttaataccttttccagtcatatttgcttgtactttacaagcatgtgatgcttggatcttg

SEQ ID NO: 2405 - DNA, 85 bp, Zea mays
  misc_feature: Incyte ID No: 700160551H1
catacgccttcatgatggttatgctaaaaattgctatagaatgctgcatcccgatatgcaaagaatctctatctaaatggtccaa

SEQ ID NO: 2406 - DNA, 82 bp, Zea mays
  misc_feature: Incyte ID No: 700160553H1
tgccattagccggatgtaattttcttcttaatcctcgaaaatcctagaggtaatttaaattttcaaactagcccccttatac

SEQ ID NO: 2407 - DNA, 73 bp, Zea mays
  misc_feature: Incyte ID No: 700160556H1
gttctagctctagatcatacctgtaaaatatgcagaggtcttttgcggatgatattcttatatcgtttttggt

SEQ ID NO: 2408 - DNA, 248 bp, Zea mays
  misc_feature: Incyte ID No: 700160557H1
caaggagctcgagaacggcgtcctgtgggaggtcgagggaaagtgggtcacccaaggtcctgttgatgtagacattggtgccaatccatccgccgagggtggtgaggatgaaagcgttgatgacacagccgtgaaggtggttgatattgttgacacattccgtctacaggagcaacctccttttgacaagaaatcatttgtctcttacataaaaaaatacatcaagaatctcactgctgtgttggagc

SEQ ID NO: 2409 - DNA, 248 bp, Zea mays
  misc_feature: Incyte ID No: 700160558H1
  unsure 201-202: a, t, c, g, or other
ctgcttcctagctgggggtgctctctaccgtttcgagtacgcagtcaacccggcgctcttcctcgccaaagcgcgaggagggacgtgcacgctcgctccctctgaccctgacgacacggtggctcgccgcgccagatacctgctgagcaacggtttcaggtgctacaacctgttcaagagcaactgcgaggacttcgcganntactgcaagactggccttcttgtcgctgagcagggcgttgtcgggc

SEQ ID NO: 2410 - DNA, 247 bp, Zea mays
  misc_feature: Incyte ID No: 700160559H1
  unsure 181: a, t, c, g, or other
cgctccctcgctgcgccataaggctgcgactgcgagagccagccgcacccgcaccagtccataggccggcctcctctcttaccttcccacaccccttctcgaccgtacgtagcctagttgtgcttggtagccagccagaaggtcgtcggccgatgatgggaggaagaacagtggccccgcngctcgtcctcgcgctggtgaccatcatcgccatcgcggcggccgagggggacgaggtgaagtgtgg

SEQ ID NO: 2411 - DNA, 245 bp, Zea mays
  misc_feature: Incyte ID No: 700160561H1
cggaaaaccccaaaaaagcgtcagaaaaagaagagagagctgggggatggacacgcacgtcggcaaattaatcgactcggtgggctccatcttccgcggcagcgacgtcctgccctggtgcgatcccgacatcatcgccggtttcgagagtgaggttgctgaggctgcaaatgaagaacagaaaaccgagagcctgatgaggctctcctgggcgcttgttcatctagacagcctgaagacgtcaa

SEQ ID NO: 2412 - DNA, 248 bp, Zea mays
  misc_feature: Incyte ID No: 700160563H1
cccgggacctcaagaacgtcaactggcgcaacggcgaactcaagccgtacgccgtcgtctggatcgactccggtgccaagtgctccacccgcgtcgacctcgacaacggcgagaacccgacgtgggacgagaagctcctcgtcccgctcccgcccacctcccgcctcgacgacgccgtcctctacatcgacgtcgtccacgccaacgccgccgagggcgtcaagcctctcgtcggctccgcacgcctt

SEQ ID NO: 2413 - DNA, 249 bp, Zea mays
  misc_feature: Incyte ID No: 700160565H1
  unsure 197, 223: a, t, c, g, or other
tggacaggtaactcaagaggtccacttattgactcttatgaccatgtaattggtgttaatacaactacattaacacgtaaaggttggtagatctggaaggtcttgatggtctaatacctgtctatgagtacgaaagaaaaggcgagagaagtcggtctctgcagcatcgcgcgtgaaaaaaaatcagccaattccangagcattgatgttgtcatgacttcanggagagaccatgctaagaataatgca

SEQ ID NO: 2414 - DNA, 248 bp, Zea mays
  misc_feature: Incyte ID No: 700160566H1
  unsure 190-191: a, t, c, g, or other
cgcgtacctccactccgcggccgtgccgcccatctaccaccgcgacatcaagtccagcaacatcctgctggacgcccgcctggacgccaaggtctccgacttcgggctgtcccggctggcggagccgggctgagccacgtgtccacctgcgcccagggcaccctgggttacctggacccggagtactacnngcaactaccagctcacggacaagagcgacgtctacagcttcggcgtcgtgctgctcg

SEQ ID NO: 2415 - DNA, 247 bp, Zea mays
  misc_feature: Incyte ID No: 700160568H1
gtcctgagccacacccttctaataaccgagctttaccagcagcttaagttccctgttaagccagctgatatcaagaaaagaatagagagcttaatagaccgggagtacctggagcgggacaggagtaacccccagatctacaactatctggcttgacagagctttggaggatcattaaagagaccgctcactttattatcagaaaagacactgtaaattggtttgttttccagttccttgttctttc

SEQ ID NO: 2416 - DNA, 244 bp, Zea mays
  misc_feature: Incyte ID No: 700160571H1
caatgctggagtgattgtgaacccaaagggagagatgaaaggctctgccatcactggacccatcggaaaggagtgtgctgatctgtggcctaggattgccagcgcggcaaatgcgattgtctagtggaatcagttgatcgaaatttacttcaaataacatttgtttgtgttgcgaattgggaagagagtttttagttagacgagcttttgatggccctaaagatgttttcccggatgatgtttg

SEQ ID NO: 2417 - DNA, 240 bp, Zea mays
  misc_feature: Incyte ID No: 700160572H1
cttcttgggttttcagtatatggtggaaggttgtttgtcttgctgagacgtttccctattgaatctaaggggcggcaaaagaagctgtatgaggttgggaccgtgacagcaatttgtgttacctgctttctgataagatgtgttgtggtcacgctatctgcatttgatgctgatgtatctctcgaggttttggaccatccagtcctagattctccaataaaagtttgcggagatactccc

SEQ ID NO: 2418 - DNA, 242 bp, Zea mays
  misc_feature: Incyte ID No: 700160575H1
aaaagagacgcatcaactgcgacagaagatttagatattggggaaaacagctcttcagaaacgctaaccagcactgttgacacatgggaagatgctggaatatctgttttgcgttccaacattatgtctgatttttcttccttagaagaggtctcatctagcattccagatgatcagcttagaatgattgacaacatcaattctttgatgtcagagttagtagtggagagagaagcgctgct

SEQ ID NO: 2419 - DNA, 75 bp, Zea mays
  misc_feature: Incyte ID No: 700160577H1
  unsure 16, 62, 69, 72: a, t, c, g, or other
cccgacaacgctgggngcccattctcgcaccgcacttcgttaggttagtttagatcacatcnttctcangtntgt

SEQ ID NO: 2420 - DNA, 242 bp, Zea mays
  misc_feature: Incyte ID No: 700160578H1
caggcactcgaggaaggtgcaatgggctatcagaaccatgtccgacgacagcggtgaccaatcaggcaacagcactcgcctcttcagcgcgatccgttcattctggaaccagttgtctgccaagctgaagaaagcaaggagagggttgccagtgaagatcctattctttctgatcgggttctactgcgctaccgcgttcgctaccgtcatcgggcaaacgggtgactgggacatattgtcgg

SEQ ID NO: 2421 - DNA, 243 bp, Zea mays
  misc_feature: Incyte ID No: 700160579H1
  unsure 2: a, t, c, g, or other
gngggggactcgtgccaaccaccaatggccgtcatggcattcgcgggggatcaggcccagaacttccactactccccaatgggcaacgccaccagccaggctgcgaatgtgacgttcactgcacgcgctgagagaacacgtgtggcgttctatagcgtgtattacaacacgaggagtgacgaccacagctcgctgtgtggcccggtgattgacgatgtccgggtatgggcattgaacgccgcg

SEQ ID NO: 2422 - DNA, 245 bp, Zea mays
  misc_feature: Incyte ID No: 700160580H1
ggcgaagtatctcctccagcagaggaagacggtagctatgaaaggcagagaactttagaagaacctgatcgcagccctgatcggtaccatcaccactggcatcacagggatgatacatatgagagcagacacttgcgccacagggatcatcgcaagcgtagacgaagccaagaaccgggcgaagtatctccaccagaggaagactgtagccatgaaagggagagaacttcagacgaacctggtcg

SEQ ID NO: 2423 - DNA, 241 bp, Zea mays
  misc_feature: Incyte ID No: 700160583H1
  unsure 57: a, t, c, g, or other
ggaaaagatgtcaccactattcagccttttaggtatgatccggatgctagtcttagnaaattctatttagcagtaatcatgcatgagtacccattcaacattgttgagcatgattattttgttgatttcatcaagtcgttgaggcctaattttgccttcaagtctagagtgactgctaggaaagatatacttgacatatactttgaagaaaaagaaaaattgtatgcccaattgaaaaatg

SEQ ID NO: 2424 - DNA, 240 bp, Zea mays
  misc_feature: Incyte ID No: 700160585H1
ggacagcttggtcaacatcaacctaaccagggtagagacaattcaggcagtgccacaggtacgcctggaaaccctagccttgacaccttgatgagcatgctcagtgggcttggttcgggaggtggcataggtgttccaaatacttccaatgtgccaccggaggagctctatgccacacagcttactcagctccaagaaatgggtttcattgacactgcggagaacattcaagcactgctc

SEQ ID NO: 2425 - DNA, 240 bp, Zea mays
  misc_feature: Incyte ID No: 700160586H1
  unsure 108-129: a, t, c, g, or other
gacctccaagagcagcagtaccactagaaggaaaaaggacaagaagcattctaggcacagtagtagcaatggaggtggtagcaaaagagacaagaagcattcttaccnnnnnnnnnnnnnnnnnnnnnnagctattaccagtggttctcaatattgtgacgcatacagtggtggtggcatcaacagcagaactgttcctgaatctgccaagatatctccattggtggtagctgaaaatgt

SEQ ID NO: 2426 - DNA, 238 bp, Zea mays
  misc_feature: Incyte ID No: 700160587H1
ggttactatggtctgactccttttctttgcctaactgttcatttgacatgataataacttctttaaaattagatgtgagtgcacaaaactataatttctgccttagactccacaatatcatttgttatatagcatgcctgtaatatgcctaaatcaatgtattgattttcagcaaagctagtgatcattgctaacaactgtcctccgcttcggaagtctgaaattgagtactatgcta

SEQ ID NO: 2427 - DNA, 237 bp, Zea mays
  misc_feature: Incyte ID No: 700160588H1
  unsure 58: a, t, c, g, or other
gccgcggctgggctgcagctgctggcggcgcggcctgccgtgcaaatgtacctcaatnaggctgtgttctgctggtaccagcgtctgcacgcgagccgtgcgccggacactgagtacggccgggccaaggttttcttgcacaaccaccacctctgcgccgtggccacgcagctcgttgcgccgccactgctcgtgctgtcgctgcttgcattgtggcgggttcaagggaaggacttc

SEQ ID NO: 2428 - DNA, 236 bp, Zea mays
  misc_feature: Incyte ID No: 700160589H1
gtttctgtttggttgctctaccaagttaagcattcttacgagaagaaggcggcgtacagcgaaggtgaagtgaatgatttgcataaagatgacaagggccagggagaggcagtcagattgggcaggaaggatgtgcctccaaagatggaggctgattcttcaacactggatgagcgggttgaggatgaagagaacgatgaagtggagcaagaaatgaagcatgatgagaacgatga

SEQ ID NO: 2429 - DNA, 235 bp, Zea mays
  misc_feature: Incyte ID No: 700160592H1
gtacgcggcgtaccaggtgtccaaggcgctcgtctccgcctacgccagggtcctcgccagggacaaccccgcgctgcgggtcaactgcgtgcacccgggctacgtccagacggagatgaaccgcaacaccggggacctcacggccgcggaaggcgccagggtctccgtcgccgtcgctctcgccgaccagggcggcgtcaccggcgcttacttcgatcgcactcaaatagcttcg

SEQ ID NO: 2430 - DNA, 218 bp, Zea mays
  misc_feature: Incyte ID No: 700160593H1
ctataagatgatttccttgtggacggaggagactacgttgaataatggattccggtgaagcatttggaatgcgtagagctgtaggctaccactatcacatgcatgtaacgcaatatactactgtgaaaataaagtgcactgcacggcggtttttttatatataaatacaaggatttttttcttgtcacctgtaaaaatttaatcagattttttgtgga

SEQ ID NO: 2431 - DNA, 237 bp, Zea mays
  misc_feature: Incyte ID No: 700160595H1
ggggtctctttgtcgattcagcccataaataaagtgtgaaataaaagccgcaggtggaggcaggaacctgctgattgagggaacagttttgcctgtgtttggttacatgaaatatctgtttcacagatgtgtagagcatggtgtaaatgcttcctgtgctgttactttcgtttcgacaaattgattatgctgtagcccttcaggtttcatctagacatttcggtgtcttggagcaca

SEQ ID NO: 2432 - DNA, 240 bp, Zea mays
  misc_feature: Incyte ID No: 700160596H1
  unsure 43, 174, 183-184, 197-198: a, t, c, g, or other
aacctggaggcgcacctgcacctgctggacggcttccgcggcnccggcgcggggttcgagccccgcgggagggaccccgcgctggtgaacaagtccaccgacttcctccgggaggaccacatggtgccgcccgtgtggtaccaggcggagaacaagggcatggtgaggacggangacggccgnngggtgctgccgcnncggcagagggtgctcgacgaccacccggaggacactgaccat

SEQ ID NO: 2433 - DNA, 284 bp, Zea mays
  misc_feature: Incyte ID No: 700160601H1
caataccttgaacaactaagcaagtccaatgtctcatgcccagccccttcgtttacaggcccagtggaaacacgtcgatattcaggataaccaagccaatgctatgaaggaaccaggaaccagtggtgggtatggctccccaatgaaagatgacaagaacaaggatgtggatacaatagcttcgaacttcatcaagcttaagcacagggcttgggcactccagaagagcacaaccatgtaccaaccttccacttaaaggtgttgctagttcaataagtcaatac

SEQ ID NO: 2434 - DNA, 278 bp, Zea mays
  misc_feature: Incyte ID No: 700160602H1
  unsure 80, 83, 120, 122, 277: a, t, c, g, or other
ggttcggcttcgatttgtggttccacgacttcctagagttcagctccaccggccgcctgctccggtacgacccgcgcagncgnagacgtccgtcgtgctcgaccgactcggcttcgccantngcgttgcgctgccgagggacgaggccttcgtcgtcgtctgcgagaccatgaggttcaggtgcatcaaagtgtggctgaaaggggataaggccggcgaggcagagacgttcgtcgaccttccggggtggccggacaacatccgtcttcgggtcggnc

SEQ ID NO: 2435 - DNA, 74 bp, Zea mays
  misc_feature: Incyte ID No: 700160603H1
ctaatccatttcggcatttccaacgccttcgccctaccagccacgtcgcttcgaggccgatcgaccgagcagct

SEQ ID NO: 2436 - DNA, 274 bp, Zea mays
  misc_feature: Incyte ID No: 700160604H1
agctcgtcctgcacttctggagcgacgacgactgcgtcaagatcctggagctgtgcaggaaggccatcccttcccgcgaagaaggagggaaggtgatcatcattgagatactcctgggcccgtacatggggccggtcatgtacgaggcccagctgctgatggacatgctcatgatggtcaacaccaagggcaggcagcgcggcgaagacgactggcgccacatctttaccaaggctggcttctccgactacaaggttgtcaagaaaatcggagc

SEQ ID NO: 2437 - DNA, 273 bp, Zea mays
  misc_feature: Incyte ID No: 700160605H1
gtaaagtttggaacggcaccagctctaactctgaagcacctgtctcatgaggcctactggtatttcttcaagacacttacatttggaagcattgatcctgagatgcaccctaggcttgctcagctggccatggagatagccagactgcagaatctttcaatcaatgctgcatatgtcacctcttatttgttgagggacaatcttaacatacacttctggtgtaaggtgctgagcttcttgagagggtacatccagaagcatgtctccaaattt

SEQ ID NO: 2438 - DNA, 123 bp, Zea mays
  misc_feature: Incyte ID No: 700160606H1
gttctactcggagggcgtgttcacgggcgactgcggtacggacctggaccacggcgtggcggcggtcggctacggcgtcggcgacgacagcacgccctactggatcgtcaagaactcctgggg

SEQ ID NO: 2439 - DNA, 112 bp, Zea mays
  misc_feature: Incyte ID No: 700160607H1
  unsure 55: a, t, c, g, or other
ggaaacactagacaaaataaaggatttagtatttttttctataaatttccaaganttatttaactgatgacaatttagggtgagaaagtgtggctatataaaagctttcatg

SEQ ID NO: 2440 - DNA, 268 bp, Zea mays
  misc_feature: Incyte ID No: 700160609H1
  unsure 96: a, t, c, g, or other
cccgagcacccaacgcgctactagttctattgccgcaccccagatctccaggagggactcgttctttcagctaactacactgcacgcaatggccancacggcgaccgaggcggcgccggcgcaggagcagcaggccaacggcaacggcgagcagaagacgcggcactccgaggtcggccacaagagcctgctcaagagcgacgacctctaccagtacatcctggacacgagcgtgtacccgcgggagccggagagcatgaaggagctc

SEQ ID NO: 2441 - DNA, 268 bp, Zea mays
  misc_feature: Incyte ID No: 700160610H1
gcgtctgtggtattcgcctattacaaggatggtgccactaatccgacattcctctatttctctcatggtcttaaggagatcaagtgctaggcgtgcggcgaaattagttacccatgttgggtactatctatgtactattattatatccaaaactatagttggcctggctgaattgaactccaaagggtttgtttgagaaaaaattgtcccaagattggattgcttgttaaagctcaatattgttattgaagtgttattgcttaaaaaa

SEQ ID NO: 2442 - DNA, 268 bp, Zea mays
  misc_feature: Incyte ID No: 700160612H1
ggaacatcttcgtgaagaagcccaagatcactgacgtcgatagggccatcctcaccctcaagacgcagcgccgcaagctcgcccagtttcaacagcagcttgagaaggtaatcgaagcagaaaaggaagctgcacggcagttggttcaacagaagaagagagacagagctttgattgctctgaagaagaagaaagctcaggaagagctgttgaaacaagttgacacatggcaaatgaatgttgaacaacagctggcagatattgaact

SEQ ID NO: 2443 - DNA, 267 bp, Zea mays
  misc_feature: Incyte ID No: 700160613H1
tgattataaggtttctatacgaccaccaaaggatggttctttctttaagaaccttccaaaatctagtgctatcaagctgattgattttgggagtacaactttcgagagccaagaccacaattatgtggtgtcgacaagacattatcgtgcaccagaagttatccttggtcttgggtggaactatccatgcgacttgtggagtgtgggttgcattttagttgagctttgttcgggggaagctctctttcaaacacatgaaaacttgga

SEQ ID NO: 2444 - DNA, 265 bp, Zea mays
  misc_feature: Incyte ID No: 700160614H1
atatggattcgtgcagacaaggcagcctggggctcttttcttcagcacgctggtggggtgcctgatagttgtgatcggcgtggtattcgtgtctctgcacctcagttcgtccaatgccgccaaacccagggcttcctcgtctgaatacagatgatgttttgatatgcaaggtcaagagacttttggtactcctatgttctagtagtctatatatttaaccaaatgagaattcgtgttattgtatgataagaattgttcctactag

SEQ ID NO: 2445 - DNA, 269 bp, Zea mays
  misc_feature: Incyte ID No: 700160615H1
  unsure 94, 226: a, t, c, g, or other
gacaacgttggaagccggctcccggaacgcgcaactgcgcggacttttcctgcaagcttcttctgcaaccgaagcaactcttcaatccagaagnggctgctccagggcggcatggcgccaaaagtctccagcccgttcctcctcggcctaccctgggtcgtcgcgcacgttggatccatcaaatcttccaatgcacgctgcgccggcccgggtcgtcacgcaaganagtcccttcttgctagcgagtagcgactagcgagaggtcgccg

SEQ ID NO: 2446 - DNA, 128 bp, Zea mays
  misc_feature: Incyte ID No: 700160621H1
gacattgaaattcttaaggcaaaggctaattttttgaaaatacaatcttttctaacccgccatggtatggaatgtactgatttagaatcagtggtttgtgtcaaagatcgtaatctgacaagcgaatg

SEQ ID NO: 2447 - DNA, 265 bp, Zea mays
  misc_feature: Incyte ID No: 700160622H1
cagcattcctatcctctccccgcccgcccgtgccgccgccgcggctttcccttcctctcccgagccaagatgaatgttgaaaagctcaagaagatggcaggtgctgtgcgcaccggggggaagggtagcgtgcgcaggaagaagaaggcagtccacaagactacaaccacagatgacaaacggcttcaaagcaccttgaaaagaataggagtgaacagcattcctggtattgaagaggtcaacatctttaaggatgatgttgtta

SEQ ID NO: 2448 - DNA, 224 bp, Zea mays
  misc_feature: Incyte ID No: 700160623H1
  unsure 171: a, t, c, g, or other
agcacagctagcgcctgctccccttcgcctgtgatcatgtcttgcagcagcggcaagtgcgactgtggctccagctgctcctgcggcagctcatgcaactgcatgtcccctaacgtggagaccgccgccgccagcagcatcaagaccacggtcctcgccgcgccgaccacnaaggccagcgccggcggcttcgaggcggccaccgagggcggcggctgcgactg

SEQ ID NO: 2449 - DNA, 260 bp, Zea mays
  misc_feature: Incyte ID No: 700160625H1
aatccatccgccgagggtggtgaggatgaaagcgttgatgacacagccgtgaaggtggttgatattgttgacacattccgtctacaggagcaacctccttttgacaagaaatcatttgtctcttacataaaaaaatacatcaagaatctcactgctgtgttggagccagagaaagcggatgagttcaaaaagggtgtcgagggtgcaaccaagtttctccttagcaagctgaaggaccttcaattttttgttggtgagag

SEQ ID NO: 2450 - DNA, 126 bp, Zea mays
  misc_feature: Incyte ID No: 700160626H1
cgccatcgcaggacatgctcgagcactgctagaatggcacagcacggcaaaattttgtggagcttgtggagcaaaggctgtacctactgaagccgggaggcgtaagcagtgcagcaacgattcctg

SEQ ID NO: 2451 - DNA, 188 bp, Zea mays; identical to SEQ ID NO: 429
  misc_feature: Incyte ID No: 700160628H1

SEQ ID NO: 2452 - DNA, 259 bp, Zea mays
  misc_feature: Incyte ID No: 700160629H1
aaatacttaatccaaaaatcccgttgagtgaacaagaggaccttattgtttggatgcggactgcagcgcttccaacattcagaaagctgtatggtaggatatatgttgatctcaaggaaaacgatacaattacagttcagttggagaacaactacaacacctatagcttcagtggcaagaagaagctggtgctttctactgcaacctggattggtggaaagaacgattttctgggccttgcatatctcactgttggtgg

SEQ ID NO: 2453 - DNA, 258 bp, Zea mays
  misc_feature: Incyte ID No: 700160635H1
gcggagacttcggaatggcggcggcggctcgtgccgggttccggcggctcttctccgtctcggccttcgctgcaccgcctcctcctgccgcgcgccccgcggcggaacccttgcaacaacctcttcgtctcagggttaaataaacgcacaacgtccgagggacttaaggaagcattttctaaatttggtcaggttattgaagcaagagtgatcactgataggatatctggatactccagaggatttggctttgtcaaa

SEQ ID NO: 2454 - DNA, 118 bp, Zea mays
  misc_feature: Incyte ID No: 700160638H1
  unsure 91-92, 99, 104: a, t, c, g, or other
agttttgtcactagatctagcgactttgccccttgatggttatgtggtataaacatggtttctccagagacggacggacagagataaaaannaaaaaanaaaanaaaaaaaagaaaga

SEQ ID NO: 2455 - DNA, 212 bp, Zea mays
  misc_feature: Incyte ID No: 700160639H1
gctggaactgaggcgattgccaagaagctagctgagcttacaaccacgaagggtgtcactaccatcatcggcggcggcgactctgtcgctgctgtcgagaaggctgggctggcggacaagatgagccacatttcgaccggcggcggtgcgagcttggaactcttggaaggcaagactctacctggtgtccttgccctcgatgacgcctagat

SEQ ID NO: 2456 - DNA, 82 bp, Zea mays
  misc_feature: Incyte ID No: 700160640H1
  unsure 49, 58: a, t, c, g, or other
gaaccgacgtgtgcgcttctgtctgtgtactctctctatgttgtaatgngtgggtgcnttgatccagatgtattcgctcgtg

SEQ ID NO: 2457 - DNA, 249 bp, Zea mays
  misc_feature: Incyte ID No: 700160641H1
actctcatgagttgccacgatatggtcttgaagttggtctgaccaactatgcagctgcctactgcactggacttctgttggctcgccgtgtgctaaagatccgtggtttggataaggagtatgagggcaatgttgaggccactggtgaggacttctctgttgagccagctgatgagaggagggcattccgtggctctcttggatgttggccttatcaggactacaacagggaacgtgtctttggtgccc

SEQ ID NO: 2458 - DNA, 251 bp, Zea mays
  misc_feature: Incyte ID No: 700160642H1
ggagaccaatattgccatgctaactgaagatcaaaccaaccaattgctgtcttcattctggattcaggcaaatcaaacagataataccccttttaattatgaggctattggacattcatacagcctaacagttctttcttcccgccttaagaattcaagcaatggcaatatcattcagtttttccaattgccattatctcttcgaagtgttgctttaaccccgagtgaagttctgccggcttattgccaag

SEQ ID NO: 2459 - DNA, 250 bp, Zea mays
  misc_feature: Incyte ID No: 700160643H1
  unsure 190: a, t, c, g, or other
gggcactgcaaatcaacagtatccttctggaccatctgcttcttatccaagcggacctccaacaacatttcatcagcctgtatcacctgttcaatatcagcctgttgctccaccagtatcttcttttggtccgagcgctcctgtaccagcaacagtccctacccagatgtttccccattctgctgctgcnaaactcaacttcaaggttcatgccatcgaacaatcaaagctttgtccgagggcaggtctt

SEQ ID NO: 2460 - DNA, 249 bp, Zea mays
  misc_feature: Incyte ID No: 700160644H1
gtggagaagagacctgtccttccttctgctggccaaaatattaggcgagaactataaggttctcctgcatttgaagttaatttggtttgatcagtagctgttgtcatggatgggatgagttcatacaaaatgattctataagaacttatgacccccaggtggcagttgtagaaatgtagctgagatttagattttcttcataatttgttggcattatttagtagggccattgttgtaccaatgttgtga

SEQ ID NO: 2461 - DNA, 247 bp, Zea mays
  misc_feature: Incyte ID No: 700160645H1
acgctcaagaagtctgccaagccacctggccgcccatttggctctggccctcctggtgaccgcccaaggggcccaggccgttttgacggcgacaggccaaggtttggtgacagggatgggtaccgtggtggtcctcgtggtgctcctggtgactttggtggcgataagagtggagctcctgctgagttccagccaatcattcaggaggcctggctttgggcgtggtggcggcacggcttcggcgcgg

SEQ ID NO: 2462 - DNA, 249 bp, Zea mays
  misc_feature: Incyte ID No: 700160647H1
gctaatctgacggtggcagtgacgactccaacgaccaggcgcggaggctgcactgctccagcgaaggcaccatgtcattcatgtctccattcccggggatggatctaagtaaaatggatcccgggactctgaccctccttggggcagctggttgtgtaatgctgactatgcatttcactgtgcaattggtgtcacaacatctcttctattggaaaaaccccaaggagcagaaagccatacttattattg

SEQ ID NO: 2463 - DNA, 250 bp, Zea mays
  misc_feature: Incyte ID No: 700160648H1
  unsure 53: a, t, c, g, or other
ccgaatcagtgatccgatcgcaagaagcaagcaacaatgtcgccggcgcgcanagcagcagcaacgtcttcgacccgctgtcgctggacttctgggcgtcgttcgccgacccgttcggcgtcgtccggccgctggcggacagtgccccgtcctcaccaacgtgcgcgtcgactggaagagacccccgaggcgcacgtgttcagggccgaccttccgggcgtcaggaaggaggctgccaaggtcgaggtgg

SEQ ID NO: 2464 - DNA, 135 bp, Zea mays
  misc_feature: Incyte ID No: 700160649H1
  unsure 74, 91, 95-96, 101-102, 104, 107, 112, 117, 122, 125, 129-130, 134: a, t, c, g, or other
atcagattatgtatagatctgtcggtaattgtttctcagcattccccaaggaaatcatacaccaagcgggagantttttttgtcataaaanaaannaaaanngnaanaaaanaaaanaaganaanaggnngagng

SEQ ID NO: 2465 - DNA, 248 bp, Zea mays
  misc_feature: Incyte ID No: 700160650H1
ggataactggagcgtgggacagcgccaacttattgcactgggtagggcgctgctcaagcaggcaaaaattttggtactcgatgaggcgacagcatctgtcgacacagcaacagacaatcttatccaaaagatcatccgcagtgaattcaaggactgcacagtctgtaccattgctcaccgtattcccaccgttattgacagtgaccttgttctggtccttagtgatggtaaaatcgcagagttcgaca

SEQ ID NO: 2466 - DNA, 248 bp, Zea mays
  misc_feature: Incyte ID No: 700160651H1
  unsure 221, 238, 244: a, t, c, g, or other
aacgcggtggtgctccgggagtggtttgaccgcgtcgacgccggccgcaccggcaacatcaccgctgcccagctccagggcgcgctcgctgtcggcaacctcaacttccccatctccgtcgtgcagcagatgattaggatgtatgacttcgatcggaatggcaccatgaacttcgaagagtttctggctcttaacaaattcctacagaaggtgcaaaatgngtttcccaccctgtatnggggcngtgg

SEQ ID NO: 2467 - DNA, 164 bp, Zea mays
  misc_feature: Incyte ID No: 700160652H1
  unsure 36, 52, 55-56: a, t, c, g, or other
ggtcgggcaggcggatcggctagggcaggacaaggncgggcacgcgaactgngcnngcccgctctgccgcaccccggcgcccgacatcaagtccatgcagatccaccacgaggcgcgccatcccaagctccctttcgagccggagaagctcgtcaacctgcaat

SEQ ID NO: 2468 - DNA, 241 bp, Zea mays
  misc_feature: Incyte ID No: 700160654H1
caactcgaagcttgcgttcttgtagtagaggtcggcagcaagcggtagagcgagaggtcgagaagatgaagagcagcactctgttggcgatcctagttctccaggcccttctggtctctacggccgtggccaaaggacctgcagggccgaagaagcagtgctggtgcggcgagtgcaccagctggtcgggcgtgtggacctgcgacgacctcctcaccaagtgcgccgccacctgcaagaa

SEQ ID NO: 2469 - DNA, 240 bp, Zea mays
  misc_feature: Incyte ID No: 700160658H1
  unsure 2: a, t, c, g, or other
anaggaggcgctcgagaaggtcgccgacttcttccagtccaagtacttcaagccgggctccgtcgtcaccttccacttcccggcaccggcctccgcctccccgggacccgcggcggagatcaccttcgcgacggagggcaagggcgacgccaggatcgcggtggagaacgggaacgtcgccgggatgatccagacctggtacctcggcggcgactccgcggtgtcccccagaacgtccgg

SEQ ID NO: 2470 - DNA, 236 bp, Zea mays
  misc_feature: Incyte ID No: 700160659H1
  unsure 198-199, 205, 207, 214, 219, 221, 228-231, 233-234: a, t, c, g, or other
ctccattgcttcctcccccaagatctccccctacgcagcaaggatcgagaaaaggaggggcacgttgaattgaagaggaagagaggatcaaggagatgttcttccccatctcctcttgaagatttcttggggaaaccctaggtggctacactccagatcatgtctagtacatttcttcttcttcgagaaggtgcttgnngcccancnggggggnggaangngcccccnnnntnntt

SEQ ID NO: 2471 - DNA, 240 bp, Zea mays
  misc_feature: Incyte ID No: 700160660H1
  unsure 70, 121-138, 152-153, 155, 159, 206, 214-215, 221: a, t, c, g, or other
cccaaccactgcctccgccgcctcgcctcagctctctcccacggtccccggcctccgactcctcccctanccctcctcttcccccgcctcgcgctctccagctccggcccctccacgggcnnnnnnnnnnnnnnnnnngatgccgtaaggcnngngganggagaggaagcggcggaagtagggccgccgaagccgacgccgaagcngggaaggnngaggancatgaggccgacggcggtt

SEQ ID NO: 2472 - DNA, 241 bp, Zea mays
  misc_feature: Incyte ID No: 700160662H1
cacctgcagttcctgggatcatatataccaggttcatacactccaatgatgatctcatctggaatggttccattgcaaggatggagcccttatccggcatcggtaaatcctgtggcatcaggtggagcacaacaaactgttcaagctggaccgttatatggtataggacaccatggatcttccaccgcaattgcttatggcggtacatacttgccatattcttcctcagctggacaatcaa

SEQ ID NO: 2473 - DNA, 242 bp, Zea mays
  misc_feature: Incyte ID No: 700160663H1
cagattttggtgtgagtgccattatatctagttcctcttcgcaacgagatacatttattggcacacgcaactacatggcgccagaaagaatcgatggaaagaaacatggttctatgagtgatatctggagtttgggactagtgatactggaatgtgcaaccggcatctttccatttcctccttgtgaaagcttctacgaacttctcgtggctgttgttgatcaaccgccaccttctgcgccg

SEQ ID NO: 2474 - DNA, 244 bp, Zea mays
  misc_feature: Incyte ID No: 700160664H1
  unsure 91: a, t, c, g, or other
ctgcttgcgggttagagcagaaggggaatttggaattgctggaacaaaggaaggcaatggagaagaatatgctttctatggcacaagagancgagcagatgcgaggcgaattagctaattttgaagttagaccaaggggcccaggtggagcatatgggatgcagattgggagttcggaagtgaccttcactaagaacccatatgaagatggttataatgcttatgtgggggttcctgagaaaga

SEQ ID NO: 2475 - DNA, 242 bp, Zea mays
  misc_feature: Incyte ID No: 700160665H1
aaggcagcagcacaagcaagaaccacacctcctcccttcgcctgtgatcatgtcgtcttgctgcggcggcaagtgcgggtgcggctccagctgctcctgcggcagggatgcaacggctgcggtatgtaccctgacgtggagaccgccgccaccagcagcgtcaagaccacggtcctcgccgcgccgaccaccaaggccagcgccggcggcttcgaggcggccaccgagggcggcggctgcga

SEQ ID NO: 2476 - DNA, 231 bp, Zea mays
  misc_feature: Incyte ID No: 700160666H1
  unsure 200, 203, 217, 223: a, t, c, g, or other
ggaagatgctgctgcagctgaggttgttgaaggggctgatctaggtattgtgggtgatgatacacaggtttccagtgatggacctttaagccctgctcctggtgtagagacagtagttgtattccccaaaaatgctggcaaaattgtactagcaggtgaagaaactgaattactagttggtctgcaaaatgagggtgaancgnctttgaatgttgtngctgtncattcaac

SEQ ID NO: 2477 - DNA, 240 bp, Zea mays
  misc_feature: Incyte ID No: 700160667H1
  unsure 196, 199-200, 203, 206, 212, 224, 235: a, t, c, g, or other
gttccgcgtttgttggaatgggtgatgtagtaacaaagaagatcatggaatgggttatgagtgatgctgaacttgttaagtcttttggtatatttgtacggctctccaatgatattgtatcaaccaagcgtgaacaaagagagaagcattgtgtctccactgttcagtgttacatgaagcagcatgaactaccaanggnnganccntgtgancagataaaagancttacagaagntcatg

SEQ ID NO: 2478 - DNA, 236 bp, Zea mays
  misc_feature: Incyte ID No: 700160668H1
  unsure 36, 58, 195, 224, 234: a, t, c, g, or other
cgcggctgggatctagcacgctagcgagcgagaganacgcacatctatctgtcaagcnacgccgcggcctcgatcagagtcggaggcgaacacccccatggcggcggctggcggcggcgcaggagggaaggtatccttcaagatcatcctcacctccgaccccaagctccctttcaaagtgttcagcgtgccgangcggcgccctttaccgcggtgtcaatacnccgcgggggntt

SEQ ID NO: 2479 - DNA, 182 bp, Zea mays
  misc_feature: Incyte ID No: 700160669H1
  unsure 69, 129, 180: a, t, c, g, or other
gtgatcatgtcttgcagcagcggcaagtgcgactgtggctccagctgctcctgcggcagctcatgcaantgcatgtcccctaacgtggagaccgccgccgccagcagcatcaagaccacggtcctcgcngcgccgaccaccaaggccagcgccggcggcttcgaggcggccaccgagggngg

SEQ ID NO: 2480 - DNA, 236 bp, Zea mays
  misc_feature: Incyte ID No: 700160671H1
  unsure 9, 72: a, t, c, g, or other
aaggaagtngccggtgcggtggtggccatactgctggttctgcagctcatggcagctccaccgacggccatngccgcccgctcgccgcgcggagccgtgccggatggctccctcgccacgacgcccaaggtgacgatgctgtcggccacgctgtgctacacgggggagacatgcaaatacattggctgcctcactcctgcttgctcctgcaactatagtgatcgtctatgctacat

SEQ ID NO: 2481 - DNA, 235 bp, Zea mays
  misc_feature: Incyte ID No: 700160673H1
  unsure 71, 207, 217, 224, 226: a, t, c, g, or other
gcacgtgggaatagacagcaaatatttatggagtctccagttggcttgagaccacatcttccagctgagangaaatgggctcttggtcttcagtctcgagcacatccaaaagaaataatgtctgaagtgctgaaagctctgcaagaattaaatgtttactggaaaaagataggtcactataacatgaagtgcagatggagtcctgcncttccgtgcncatcttnanaacaatcat

SEQ ID NO: 2482 - DNA, 236 bp, Zea mays
  misc_feature: Incyte ID No: 700160674H1
  unsure 215, 229, 232: a, t, c, g, or other
caacccgtcagcccctctcgtttttcatccgccttcgcctccaaccgcgtgcgctccacgcctcctccaggaaagcgagagcttctgcataagaacaacaaatcaaaagcgtgatcagctcggtgccaacaaaacctcaacaaccaagtttcatgtctgatctcgacgtccagcttccatctgcctttgatccgtttgctgaggcaaatgctgangatctggtgctggnccnggaa

SEQ ID NO: 2483 - DNA, 229 bp, Zea mays
  misc_feature: Incyte ID No: 700160675H1
  unsure 147, 164, 171, 173, 175, 185-186, 205, 210-211, 213, 222-225: a, t, c, g, or other
ctcttctttaaaattttctcatcttccttcaccattctggcagcttgtctgttcaagacgctgacaattcttttcctttttgcccctttggcacccttgctaagccgctcataatcagggtattcaaatttagagcacccatcaccnggtttaaccttcgtttnggcgggntncngaggtgctgnnatcaagggtcttattttgnagtanngnccccgatannnnaaaa

SEQ ID NO: 2484 - DNA, 237 bp, Zea mays
  misc_feature: Incyte ID No: 700160676H1
  unsure 16, 231, 234: a, t, c, g, or other
caagcaacgaagtganagaagcggagccgtgaattgacttcagtcttcgaatcgttttcgccataccaaggaatggaaggcaaagtagagaagatctggatcaccgagattgcgtctgatggtgttcacctggtcggacataccaagggatacatccaggtgctggtaactgctcctgatagcatgttgggaacgtccgcggacgcgaagatcacgtctgtcggacgatgntcngtt

SEQ ID NO: 2485 - DNA, 236 bp, Zea mays
  misc_feature: Incyte ID No: 700160677H1
gatcttctgagggatgagcttagctcaggcctccatgctgtctccattgttgcgaaaaccccgaaagagttagggtcttgattgtataacaatgttgaataagcactgtcctatgtttcgaaataagtctgtcgtagcagtgtcatgtaaccatgaactgattgccaaaacaatgtcaccggcatgctcttcttattaagatctggtattcggattagattggagtgaagaatgta

SEQ ID NO: 2486 - DNA, 236 bp, Zea mays
  misc_feature: Incyte ID No: 700160678H1
  unsure 216: a, t, c, g, or other
attgagacaaggaagctcagcgattactaagacagggtttatacggagtgccaagaagttccggtgggtgaagcttgatgaccctgtggacactaacaagctttgccacccgcaagcacttaccaagttctgcttctttctgctggatgctctcaaggaaaggggtgcaaggatgaagccgttgatctgtgcttgcttagcaaaggagccagaganggtgctagttgtcggggcac

SEQ ID NO: 2487 - DNA, 95 bp, Zea mays
  misc_feature: Incyte ID No: 700160679H1
  unsure 38: a, t, c, g, or other
gtcccctagccctactatactatacgtcgtcagcaganagtctggttttgatttcaataataagatgcacctatatgtgtgtgttacatgtaaaa

SEQ ID NO: 2488 - DNA, 241 bp, Zea mays
  misc_feature: Incyte ID No: 700160680H1
gggtattggtgctacacggcttcaccccggcgctgacattctgagttcgcctcacgcgctcaccttctcagcgttctctgagctactgccctgtggatccccgcatctatcataaggccacatataccttagtgtttagaaataaataataattatataaagcgagaatttgaacccatatcctctactccagaaattttccatcagaccatagttaaaaataaacaataattatatttaa

SEQ ID NO: 2489 - DNA, 238 bp, Zea mays
  misc_feature: Incyte ID No: 700160681H1
  unsure 6, 10: a, t, c, g, or other
caaganaggngaggaggaagactgtagatctgaagaacctaaggagaaacaatcagagtacttgctggaacacatatatcttccatgataaaagttagatttcttgtttggtgctcatgcatgggttccatatgttcttcccgtcttattagaacatatctattggactaccatgcataaaaagccgtcgtttcataaactattgggactatacggcaccaatgaagctattgatgct

SEQ ID NO: 2490 - DNA, 71 bp, Zea mays
  misc_feature: Incyte ID No: 700160682H1
ctttctcgttaacctgagacatttattgcatgaaagacacctaatccattcataattcaagactgagaaat

SEQ ID NO: 2491 - DNA, 236 bp, Zea mays
  misc_feature: Incyte ID No: 700160683H1
  unsure 93, 208, 220: a, t, c, g, or other
gtcaagtggcacttcgtccggatcgagccggtgggtccaaagttctagatccgaggatgacctagatctccaggcccagatggagaggagganaaagcggaggaaggagtcgaatcgggagtcagctcggaggtctaggcaacggaagcaagaacaccttgacgacctcacctcacaggtaaatcagctgaaggaccagaacaagcangtcagcatggcnctgagtataaccagcc

SEQ ID NO: 2492 - DNA, 234 bp, Zea mays
  misc_feature: Incyte ID No: 700160684H1
aaacacctcgcttcactagaggaataatctagcagcttctgttgcctccaaattgtccggagaaaggagttgaagcagtgtgagagggccctgagacgatggcgaacctgttcctcaagcaggcaaagcagtacgtggcgacgcggccggtctacccgccggagctcttcgacttcatcgcctccaagacccctcgccgcgacatggcctgggatgtcggcaccggcaacggct

SEQ ID NO: 2493 - DNA, 230 bp, Zea mays
  misc_feature: Incyte ID No: 700160685H1
  unsure 142, 215, 218, 221-222, 224, 226: a, t, c, g, or other
gtcattgctggtccatcctgataaatgcaagcatcctcaggcacaagaagcttttgcagctctggcgaaagcacaacagctcctgcttgatccacaggaaagaggctacattcttgaccaagttactgctgcaaaagaaganttgagggcaaagcggaaaaaggagctgaagaaagacagtgcgtccaagataaatctcttgtagatgggggaanttntgnngncntttt

SEQ ID NO: 2494 - DNA, 230 bp, Zea mays
  misc_feature: Incyte ID No: 700160686H1
cctctcccccatggtcgaaccggagctcgaggccgggcccgggctcccaaccagcggctccgacgagttcaagcccttcatccgtcgcctccccgagttcaagttctggtatgccgtcacaaaagccttttgcattgcctttgtcatgaccttcttctctgtattcgacgttcctgtcttttggccaatacttctctgttattggattgtgctttttgtcctgacaatga

SEQ ID NO: 2495 - DNA, 218 bp, Zea mays
  misc_feature: Incyte ID No: 700160687H1
cgccccaacacactccatgtttctgctgaagtgatccgcgtaggaagtttagctgttccttctggcgcagataagtgggcgctgcaaaaggatcaaggcatggagctggtcttttctgcagattttgagcctgatacccgtcttcactgtggctgcaacaccattaccgcggtgctgcgtggtggcttctgccttttctttgtttcggcaataatgct

SEQ ID NO: 2496 - DNA, 230 bp, Zea mays
  misc_feature: Incyte ID No: 700160688H1
  unsure 91-93, 163, 228: a, t, c, g, or other
tgggattataaaggcgagcgatcctatgaagaaggcgtgggagtaccgcttgcaagggtggcaggcatacaagaacagcttgctatgaagnnnggggggcgccatgagcatccccaagtataagggcgaatccagtcagtttggcgaaataagcgcatgcggnaaaggttttcctgcagttgagtcaggacctaattgacatcagattcactgcagaggagactcatncc

SEQ ID NO: 2497 - DNA, 231 bp, Zea mays
  misc_feature: Incyte ID No: 700160689H1
  unsure 48, 193, 209: a, t, c, g, or other
gaagcaggtagaaagtcttaggctctctattgtgtatgtatcttgtanccccgtcatcaaaatcggtggccatagcaacataggaagtgcctggatcgcctcataagttagtgtacatatatcagctatgtctcacccaaattgtagatttgttagtttgttgttcttaacccttctcttctgggctgccagnttaacaatgtcatgcngggtaacgggttaaaccaaaaa

SEQ ID NO: 2498 - DNA, 230 bp, Zea mays
  misc_feature: Incyte ID No: 700160690H1
  unsure 93, 222, 225: a, t, c, g, or other
gtcaagtggcacttcgtccggatcgagccggtgggtccaaagttctagatccgaggatgacctagatctccaggcccagatggagaggagganaaagcggaggaaggagtcgaatcgggagtcagctcggaggtctaggcaacggaagcaagaacaccttgacgacctcacctcacaggtaaatcagctgaaggaccagaacaagcagctcagcttggcccntgngtata

SEQ ID NO: 2499 - DNA, 228 bp, Zea mays
  misc_feature: Incyte ID No: 700160691H1
  unsure 218, 220, 225: a, t, c, g, or other
gatgctcttctttcacatttgctcacccattgatcatgttacttctgaatgctgaatttaaataaattgaactgatttgttttgaatctggaccatggaatttgagttagaggccagtgcatggtagggcccttaaatattttcttttcaggtgtcagaacggcaatttgtaggttagctcaaagtgttctctagtcgagaaatggaaaggcagaaangngtaancct

SEQ ID NO: 2500 - DNA, 230 bp, Zea mays
  misc_feature: Incyte ID No: 700160692H1
  unsure 162, 225: a, t, c, g, or other
cctttatgaaacttgcctctgcatctggcttttatccttttatgatgctgcagttgattatttgtccaccacaagggttatgccaagacttgtagaggttgtcaagggctctactaaagagaaggtggtcagagttgttgtgttgtccttccgcaatttgcnggcaaagggtgcatttgctgcccagatgatcgatcttggattgccacaaatggtacaaaactngaaag

SEQ ID NO: 2501 - DNA, 231 bp, Zea mays
  misc_feature: Incyte ID No: 700160693H1
ggcaccacacctcttcctcctcttcctcctcctagcacagctagcgcctgctccccttcgtctgtgatcatgtcttgcagcagcggcaagtgcaactgcggctccagctgctcctgcggcagctcatgcaactgcatgtcccctgacgtggagaccgccgccgccagcagcatcaagaccatggtcctcgctgcgccgaccaccaaggccagcgccggcggttcgaggcgg

SEQ ID NO: 2502 - DNA, 231 bp, Zea mays
  misc_feature: Incyte ID No: 700160694H1
  unsure 209, 215-216, 226, 229: a, t, c, g, or other
gcgcctcgacgatgacacagagaacctcgcccatgagcgagttccaagtgacctgaagaaaaatctcatgcaagcaaggctcgataagaagttgacccaggcacagcttgctcaggtatttctgtggattcattagattttagaacttcagcagttccattcatagtgtctgaaccttgatttgtcgtttgagtctatcccgacttgcntgggannaaaagtctangcngt

SEQ ID NO: 2503 - DNA, 233 bp, Zea mays
  misc_feature: Incyte ID No: 700160695H1
ggagagcaggagtgacaagaggagcgaggagcctactactctgcatagtttcaaccccgtgactggctcaacaaaggtcgtctcacctgacgagcagagcgagcctgctgctgggtctgggtccgggtctgggtcaggcccgcgtgaagcgtggtggaagaagcagcttctctccctttacaggaacgccaaggagagcaagcatctctggcctatcgtcgccaccactgctg

SEQ ID NO: 2504 - DNA, 235 bp, Zea mays
  misc_feature: Incyte ID No: 700160696H1
  unsure 226, 231: a, t, c, g, or other
gactacctggctgtgactgcggcgaacacgcgacattcctgccgcactccgcggggcgctactccaagaagcggttccgcaaggcgcagtgcgccatcgtcgagcgcctcaccaactcgctcatgatgcacgggcgcaacaacggcaagaaggtcatggccgtccgcatcatgaagcacaccctggagatcatccacctgctcactgacgccaatcccatccaggnggtgnggag

SEQ ID NO: 2505 - DNA, 258 bp, Zea mays
  misc_feature: Incyte ID No: 700160701H1
cgtttcggtccgcctcagcccgccgcaaggagaggtaagttcaggagacatcttcgagaagctgaaatggctcctaaagctgctcctgccaagaagggtgatgccaagacccaggccttgaaggttgccaaggctgtgaagtctggggcagccaagaagaagaccaagaagatccgcacgtctgtgacatttcaccgccccacgaccctgaagaaggctagggaccccaagtacccacgaatcagcactaccggaagg

SEQ ID NO: 2506 - DNA, 256 bp, Zea mays
  misc_feature: Incyte ID No: 700160702H1
  unsure 17: a, t, c, g, or other
gccaccagcctgcgaancaacccttcagcagcagaccgtaacaagggaacactccggtacacggagcagggcggcggattcaagtcggcagcggactcatgctgtggtccgacgtgaactcgttcggcgtcaccatccttcgcctactgacagggcggtcgcagcaagggatcggtgagatggtggaggaagcgatggagaaagggaattgcactcgatcatcgacgcctccgcgggggagtggccgctcgtgcag

SEQ ID NO: 2507 - DNA, 256 bp, Zea mays
  misc_feature: Incyte ID No: 700160705H1
atctcgtctcatctactcagtaccatgcattacttctgctgttcaaagcttatttgcaccgtcggttttgaaccatgctcacctaccaaaaccaaaaaaaaaaaaggtaacaaaaggaaatcatattccggtgagcgttagaggagcgagtacaagcttatatgctctctgagtattgtatccgatgggccatattcagcgcacatcgaacttcactgtgctcgactgaaaattgtgtaatgtgtattagcctatt

SEQ ID NO: 2508 - DNA, 255 bp, Zea mays
  misc_feature: Incyte ID No: 700160706H1
  unsure 11, 27, 119, 176, 200: a, t, c, g, or other
aaccagaccancaaacaagtgccagcnccctctcgcagtcgccgcaatggagagcaccttcatcatgatcaagcctgacggcgtccagaggggcctcattggtgagatcatcagccgtnttgagaagaagggcttctacctcaaggccttgaagcttgtcaacgtggagaggtcgnttgccgagaagcactacgccgatntcgcctccaagcccttcttccagggcctcgttgactacatcatctctggccctgt

SEQ ID NO: 2509 - DNA, 257 bp, Zea mays
  misc_feature: Incyte ID No: 700160708H1
aacacatgttgctccatctgaggaagcaacttcaaaagggtcttctccgccgaaagttgaagagaaatcaagggtagaggaaaaagccccgaaagtagaacctcccaagatgcaagcaccgaagccaactgcaccattaaaaacgtccccttcagaaccacaactccctccaaaagaacgggagcggcgggtgccgatgccaaggctcaggaagcgtattgcaaaccgtcttaaggattctcagaacacctttgcaa

SEQ ID NO: 2510 - DNA, 214 bp, Zea mays
  misc_feature: Incyte ID No: 700160710H1
agctggttgaccgttctttattacagtttgtttttgcaggctacgctaccgattttctcttgtgtcaggcataaaaaaaggttggacgggctgctagtattccctgctgtttggtgttttcgtatcggaggacgtctgtagatgtacaattcctcaggccccttgtgttcggcttgaggaagtttccgttgtaccctggacctgctatagccgg

SEQ ID NO: 2511 - DNA, 184 bp, Zea mays
  misc_feature: Incyte ID No: 700160712H1
ctgctgccgagtagtttatttgctacttctttatctagacgaatctggacaggaggtcccttatgacgcgaacttcataaaattgtctggcgacatgttttcttctgtccctgccctaaactctaaacccaaaggttattcgtaacaagtgttttaagattatttttgtttatgtttgggttcg

SEQ ID NO: 2512 - DNA, 96 bp, Zea mays
  misc_feature: Incyte ID No: 700160716H1
  unsure 4, 62, 75, 85, 88, 91-92, 94-95: a, t, c, g, or other
aganaccattgttactgtatccccttgatgtcaaactttttagtacaatttgtggttctganaaggttggttgantgttgcagcnaanacnnanna

SEQ ID NO: 2513 - DNA, 130 bp, Zea mays
  misc_feature: Incyte ID No: 700160720H1
gttgctctgtgttgtctgaaacgtataagcgtctcagtggcatgttttcataactgtattgtagtgctttcatcattctccgaagtttgttgtgtgagtatgccttaaatataccagtgtagtttgcttc

SEQ ID NO: 2514 - DNA, 250 bp, Zea mays
  misc_feature: Incyte ID No: 700160721H1
aaaaaccttgacaagaacgaattcgcctccggctctcctcttctcgagcgttttcggcaccacggcgcagtaggatggcggcggcggccccgacgagagcagaggtgctgtcgctcttccgttccttactccgcacggcgaagaagttctcggactacaacatccgcgagtacacgcgccgacgcgccgcggactccttccgcgaaaaccgcgccctcgccgatgcgtcggccgccgccgcggcgttctc

SEQ ID NO: 2515 - DNA, 248 bp, Zea mays
  misc_feature: Incyte ID No: 700160724H1
gccacaagaaccctctcaagtcagactggtgcctcggaaagctgagagccgcactggaagacatgggataccgagacggagacaccatgttcggagccccctacgacttccgctacgcgccgccgtcccccggccagacgtccgaggtgtactcccgctacttcaaggagctgatggagctggtcgaggccgcaagcgagaggacccggaagaaggccgtcatcctcggccacagcttcggcggcatg

SEQ ID NO: 2516 - DNA, 247 bp, Zea mays
  misc_feature: Incyte ID No: 700160725H1
  unsure 71: a, t, c, g, or other
aatttgggcacggtcgcttccagactaccgatgagaagcagaggttctttggcaagctcaaggcgtaaggngctgcggtgcagcgaagtcccatttctcaaaatcatcaaactgtgatacttttgtttgtaaccttgctgtaccaagttttgtagccatggtccggtcgtctatggattgttccatgcttcagaactgcactgtctatgttttgtgctattttggttgtttaatgccccaatcattg

SEQ ID NO: 2517 - DNA, 247 bp, Zea mays
  misc_feature: Incyte ID No: 700160728H1
aagaacatggccaccctcttggcagagtttgacaagattaacaaaaagcttggctttcggaaggaggatcttccaaagatcgaggaagagcttgaattggaaattgccaaaagtgagctgactgaacttaagaaggaatgcgttgaagcaatggagactcaactcaagagggaggagtttcaagatgaggagatgcctgatgtcaggaaattggacatcagaaacttcctgtaggcctgatcgacga

SEQ ID NO: 2518 - DNA, 235 bp, Zea mays
  misc_feature: Incyte ID No: 700160729H1
tttttttttttctcatgtggattgtctgacatggcataagcggcaatgggtaaccaagtgttgtggtctatatctctgttacccaacttgtgagctctctttattgtgctccagttattcaatctgtaattgtgatactacaagagaataagatgcgcatgtatctctgagagcaactgtgatttatgattggtgctaccttgggctcaaaaacatgtgaacagtcgttctatga

SEQ ID NO: 2519 - DNA, 247 bp, Zea mays
  misc_feature: Incyte ID No: 700160730H1
  unsure 44, 51: a, t, c, g, or other
atgagcgggcagcacccatcactggaaaagaagttagaacaggnttggaangacctgggctttctgtttctcaaaagatattttattgtattagcttcgttggtggccaatatgtatggtcacggttacaatctttttctgctttccgtcgatggggcgattctgaacagagaccactagcacgccgtgcttgggcgttgatgcggaatgctgaagtattttatagggctgcttcattcttgaacct

SEQ ID NO: 2520 - DNA, 249 bp, Zea mays
  misc_feature: Incyte ID No: 700160732H1
  unsure 65, 133: a, t, c, g, or other
cccacggccacaacctcatcctcaaggttgttgactccaagatggtcgtccagagaggccgcgcnggagggccccagggaagacagatgaggattgcggagtgcttggttggtgatgaaaccggcatcattgncttcactgcaagaaacgatcaagtggatgtaattaggcctggaacaactgttgaactgaggaacgcaaagatcgacatgttcaagggttcgatgcggcttgcagtggacaagtggg

SEQ ID NO: 2521 - DNA, 120 bp, Zea mays
  misc_feature: Incyte ID No: 700160734H1
aaggcttttccatgtaaattagacaatcaataatacacatgaatggaggtaatccgtagttgttccttgaaaacgagcactgtattcttgctattgcaatactatgtttggtttgttccc

SEQ ID NO: 2522 - DNA, 246 bp, Zea mays
  misc_feature: Incyte ID No: 700160735H1
  unsure 16: a, t, c, g, or other
aagaccatggcattcngcggaggaaggagggcctgtgcgggaagcatccaggcagtgaacatcgcgtgcacagccatcgcgaggatcgtgcaagagtttgcgtggacgctcaaggaaggcgacgaggacaaggacgacaccatccagcttacaaccaacaggctttacccgttgcatgtgtacctcacacctagaggaaggaaatgagcatcacatttatttggtctctggtctgtgagcatatga

SEQ ID NO: 2523 - DNA, 245 bp, Zea mays
  misc_feature: Incyte ID No: 700160736H1
  unsure 6: a, t, c, g, or other
cgacgngcaagtcgttataagatcaagctcttgaatccgtgccgcaaaggaaagaagctgcttgtccttgacattgactatactctgtttgaccataagtcaacagctgagaatcctatggaactcatgcgcccatatcttcaccagttcctcacagctgcatatgcaaaatatgacatcatgatatggtcagcaactagtatgaaatgggtggagttgaaaatggaacaacttggagttcttag

SEQ ID NO: 2524 - DNA, 246 bp, Zea mays
  misc_feature: Incyte ID No: 700160737H1
aactcttcgtctttctttcttcttcttctcttctccactgcacatcctcctttcttcttctcctcgtcgatcggcaagctaaggaggcaccattgcttgtcgtctgatccccgccgggcgcgtgtcgctgcacaagatgacgacggcaacagccgttggcagcgtcgccgaccgcatcatgccgcacctcctcaacatatatggatcgtctgcgacggcacgggacttcgagatttacgcgccaaa

SEQ ID NO: 2525 - DNA, 245 bp, Zea mays
  misc_feature: Incyte ID No: 700160738H1
  unsure 73-139: a, t, c, g, or other
caattgttcagtttgatgcggttcgtgtcccaacagtgcatagttcttggggtttgaaacgatgaagaagatnnnnnnnnnnnnnnnnnnnnnnnnnnnnnnnnnnnnnnnnnnnnnnnnnnnnnnnnnnnnnnnnnnngtatactgcagcagaaaaatgtttagacagcatctcttgctcaagtaactcatgcatggcatctgtactgtacatgcagctagcagtaaaatacagaatatctgcc

SEQ ID NO: 2526 - DNA, 220 bp, Zea mays
  misc_feature: Incyte ID No: 700160739H1
  unsure 5, 14, 26-27, 31, 35-36, 39, 132, 136, 138-140, 156-157, 163, 166,174-175, 177, 179, 188, 195, 197, 212, 216: a, t, c, g, or other
gccantttggagangtccctcagganngcancggnntgngcgacaattgtgcttccagtattgagcagaaggatattgatgtcacctaccatacaaaaattatagtttcacttcttcacgatatgcaacttnatgntnnnagagctacactactanngctggnggntaagttcnngncngagtggacnggtgtangnagtttcaatgaagcnggtnatct

SEQ ID NO: 2527 - DNA, 244 bp, Zea mays
  misc_feature: Incyte ID No: 700160740H1
ggcagcagcacaagcaagaaccacacctcctcccttcgcctgtgatcatgtcgtcttgctgcggcggcaagtgcgggtgcggctccagctgctcctgcggcagcggatgcaacggctgcggtatgtaccctgacgtggagaccgccgccaccagcagcgtcaagaccacggtcctcgccgcgccgaccaccaaggccagcgccggcggcttcgaggcggccaccgagggcggcggctgcgactg

SEQ ID NO: 2528 - DNA, 242 bp, Zea mays
  misc_feature: Incyte ID No: 700160743H1
cggctattaatcatacatcttccaaaactaaatttggagactaggaaagatgctactcaagttgttgcaaacttgcaagacagcaagtatcctcaaagatagtagcgtctgagtacctagagtcaaataaagatctcttggacattttaattttagggtatgagaacatggacatcgctttacattatggtgctatgttgagggaatgtattcgccaccaaagcattgcaaggtatgtttta

SEQ ID NO: 2529 - DNA, 242 bp, Zea mays
  misc_feature: Incyte ID No: 700160745H1
  unsure 50: a, t, c, g, or other
catggatcggagtacagttttggagcacatgatcacccatcgagtggagntttgaggtggaaccaaagagctgcccagggttcatatacagatgtacggttttcataggccacacaactctgaattccttggaatttcgagaattcattcagaggatggcctcagaataccatggagatacctaccacctcatttccaagaactgtaaccactttacagatgatcttagcaccagattaaca

SEQ ID NO: 2530 - DNA, 243 bp, Zea mays
  misc_feature: Incyte ID No: 700160746H1
ggaaggcgccatgaaagctgcggaggacgccacgcgctgccctcagatcccccggcgttgccaccactgtgccgggccactctccaaggacatggaaacgagcagctggacagtacctccgttggttcgagatagcttctccatgattggttcggctcttgggggtatagcaggagcgttttatggtttcaaccatgttatgcctgttgttcgacgtcacataaagggcccaatgtggatgca

SEQ ID NO: 2531 - DNA, 244 bp, Zea mays
  misc_feature: Incyte ID No: 700160747H1
cccatccattgcaatgaattacctgctaaagcagaatccggtgctgaggatggtttgcttccaaaagaagcgcagatttccatcatccccgatcaggatgagctgcatggttttccagcttatgctacttgatataatgatatgccttcaatatttatttctggtgtagaaaaagcacagttttggaggcccagtggcaactgagcaacgcgatgtattactctctccgttcttttttatttgc

SEQ ID NO: 2532 - DNA, 251 bp, Zea mays
  misc_feature: Incyte ID No: 700160749H1
  unsure 11: a, t, c, g, or other
ggcaattcgangctggcaatctaatcgtctgccatcccgtctcatcgttctcccaaatctgagagcgttcccaggacctagggttcttgagatccagccccaggatggatccgaaccctagagctcccctcctcctcgccatcgtcgttctcgcgcttggcgtatccgtggtggccagcgccgaggacgacgcgtcgggggtctctctgggccgccgcgccggggggttcttgcacggcctgaagaaggat

SEQ ID NO: 2533 - DNA, 249 bp, Zea mays
  misc_feature: Incyte ID No: 700160750H1
  unsure 242-243: a, t, c, g, or other
gtggggtccgggcgtcaccatagctggtggggtccgccagtcagtttgagttttggtgcgtgaagacagtgttggtagcccatcggcgcgtagagcgccatacaaatacaatctgccgtacagttaccttgcagttgtaaaatacctgcgtgaaaaagaaaaaaaaaattctgagtccaggttatccctccacatgttcatgtactcggaccggaaaaaatgtaatcactttgaaacccganngttctg

SEQ ID NO: 2534 - DNA, 247 bp, Zea mays
  misc_feature: Incyte ID No: 700160751H1
gctggagcaggatcagcaactctttcaatggcttatgcagctgccaaatttgcagatgcttgcctgagaggattgcgtggtgatgctgggataatagagtgctcttatgtggcttctcaggtcacagagttgcctttctttgcatccaaagtgcggctagggcgatgtggcattgaggagatcctaccacttggaccattaaatgagttcgagagatctggtctggagaaggcaaagaaagagctgg

SEQ ID NO: 2535 - DNA, 233 bp, Zea mays
  misc_feature: Incyte ID No: 700160753H1
  unsure 48, 229: a, t, c, g, or other
gacgggtataatcccttgttcaatcagatagaggtgatggtttttttnctcgtagatcacaggaaggaatatttcataaagttctcgttaaattctggacgccttttgttttacacaattccttgtatcatagaatagtgagcgagcgtatattcttacaacagtttttgtccttcaatagaaaaattacagtttatttattatgaatacagtacatacaattatagtnaaaa

SEQ ID NO: 2536 - DNA, 85 bp, Zea mays
  misc_feature: Incyte ID No: 700160755H1
  unsure 2, 30, 47, 55, 73-74, 77-80: a, t, c, g, or other
tnttgtgaatgatctagctagctatccgtnaatgatctagttatgantgatattntaattgtgatgcaaaacnnaannnnaaaaa

SEQ ID NO: 2537 - DNA, 82 bp, Zea mays
  misc_feature: Incyte ID No: 700160757H1
ccacagaatctacttggtgattttattccagtgttgttaatcaagtttatgtgattgttaactaaagggcatcaatgagact

SEQ ID NO: 2538 - DNA, 243 bp, Zea mays
  misc_feature: Incyte ID No: 700160758H1
  unsure 202, 214, 224, 229, 232: a, t, c, g, or other
gcgacatctcgctcaccaagatcgagagcaggccgcaccgccaccgccccatccgcctcgtcgacgacgccaacgtcggcaccgccaagcacttcgagtacatgttctacgtcgacttccaggcgtccctcgcagagccccgcgcgcagaacgcgctggccgaggtccaggagtacacgtccttcctccgggtgctcggganctaccccatggnacatgacccncatgnacngcgggctcttt

SEQ ID NO: 2539 - DNA, 239 bp, Zea mays
  misc_feature: Incyte ID No: 700160759H1
  unsure 236: a, t, c, g, or other
agatcggcggcgtcatgatcatgggcgacaggggcacggggaagtccaccaccgtccgctccctcgtcgacctgctcccggacatccgcgtcgtcgtcggcgaccccttcaactccgacccggacgaccccgaggtcatgggccccgaggtccgccagcgggtcctgcagggggacaccggcctccccgtcaccaccgccaagatcaccatggtcgacctgcccctcggcgccacngag

SEQ ID NO: 2540 - DNA, 237 bp, Zea mays
  misc_feature: Incyte ID No: 700160761H1
gtcagcgacgaggtgagctcgtcgaccttggctccctttgtgagcctggcgctccatcctatcgctgtctctccgcacaccatgggcatctgcgcgtggttccggcaggagcagcgtgaaccgtccccgtatggcctggcttttcaacaaacattcccaacgatctgggaacacgctgacgacgtaaacgccttactgaacaaaggcatggtcgcggacagccgcttcctgatgcca

SEQ ID NO: 2541 - DNA, 112 bp, Zea mays
  misc_feature: Incyte ID No: 700160763H1
  unsure 69, 71, 82, 86, 93, 95, 97, 100-101, 106, 109, 111: a, t, c, g, or other
gacaacgtcgtgctgctgccccacgtcggcagcgggcaccaaacgagacgcgcaaggccatgggccgancntcgtgttcggnaacntgaaggngnangtnntcagnaancng

SEQ ID NO: 2542 - DNA, 245 bp, Zea mays
  misc_feature: Incyte ID No: 700160765H1
  unsure 83-106: a, t, c, g, or other
cacgggtagtgccatggcacacagggctgttgatgctgtattaggtccccggaccattcagcatgagactgttgcctcagaannnnnnnnnnnnnnnnnnnnnnnnccagtgatgaatgctgatgcttgcagcatccattctaaggctttccaagattgtctcaacaactatggcagcgagatcagcaattgccagttctacctagacatgctgaacgagtgccgccgtggtggtgtgtctgcct

SEQ ID NO: 2543 - DNA, 242 bp, Zea mays
  misc_feature: Incyte ID No: 700160767H1
gacaaaaccagaccaccaaacaagtgccagcgccctctcgcagtcgccgcaatggagagcaccttcatcatgatcaagcctgacggcgtccagaggggcctcattggtgagatcatcagccgttttgagaagaagggcttctacctcaaggccttgaagcttgtcaacgtggagaggtcgtttgccgagaagcactacgccgatctcgcctccaagcccttcttccagggcctcgtggacta

SEQ ID NO: 2544 - DNA, 239 bp, Zea mays
  misc_feature: Incyte ID No: 700160768H1
  unsure 234: a, t, c, g, or other
gacccgtcagcccctctcgtttttcatccgccttcgcctccaaccgcgtgcgctccacgcctcctccaggaaagcgagagcttctgcataagaacaacaaatcaaaagcgtgatcagctcggtgccaacaaaacctcaacaaccaagtttcatgtctgatctcgacgtccagcttccatctgcctttgatccgtttgctgaggcaaatgctgaggactctggtgctggtcctgnaagaa

SEQ ID NO: 2545 - DNA, 237 bp, Zea mays
  misc_feature: Incyte ID No: 700160769H1
  unsure 226: a, t, c, g, or other
gaagaattcaagagttgcacaatgctcataattgcccaccgtttgaacacggtcattgactgtgacaggttgcttattctaagttctgggcaggttctggaattcgactctcctgagaatcttctaagcaacgaggggagtgctttctccaagatggtgcaaagtacaggacctagcaacgcagaatacctcaagagtcttgtatttgcaagtggagaagagaggncccggaggaaa

SEQ ID NO: 2546 - DNA, 205 bp, Zea mays
  misc_feature: Incyte ID No: 700160770H1
gatcaatcaaactttttaatagcttataatctcatatggaattgcaaaactcctattatgacgacgctaaaactgtgcagttcatcagcctttacaattacagccaagaaaagaaaatgaaaaaacaaaacctaggaaatagtcggctgctcggcgtccaaaaccttttctttaagcaaacaccgcattggttgcaaaactgcac

SEQ ID NO: 2547 - DNA, 236 bp, Zea mays
  misc_feature: Incyte ID No: 700160771H1
agcaccttgaaaagaataggagtgaacagcattcctggtattgaagaggtcaacatctttaaggatgatgttgttattcagtttgtaaatcctaaagtgcaagcgtcaattggtgctaatacatgggtggtcagtggaactccacagacaaagaagctgcaagatctgcttccgtcgattatcaaccagcttggtcctgacaacctggacaatctgcggaggctcgcagacaattc

SEQ ID NO: 2548 - DNA, 234 bp, Zea mays
  misc_feature: Incyte ID No: 700160774H1
  unsure 147, 209, 215, 217, 221, 224: a, t, c, g, or other
atgatttattatagttggtttattattgtgcatgacaagataactttgtttaattggaacatggagcttaactcgagaaaacagtgcaaccacaaggactatatggctctggtcttggctgattaattaagaaagctagtgtgagtnaatcctttcccgaaaggggcaagcggggtggagaagctgctggtatagggaggttctcgggncgatcngnctgnganagcttttggg

SEQ ID NO: 2549 - DNA, 233 bp, Zea mays
  misc_feature: Incyte ID No: 700160775H1
  unsure 172, 205: a, t, c, g, or other
cttaacttttagccatagtgttgctagctctgctatccaagatacacctgctcggatgtcaggagacggtgtggtttctgtgaacaacatatccaatgtggccaatgacatgcgtagtcctcgtgactgtgatgaatttctatcggagttgtctagatttatgaatgattcncctctgcgtaacactcctcttggagagtgctcnggtcttcctccgatgtctgaagctgagg

SEQ ID NO: 2550 - DNA, 234 bp, Zea mays
  misc_feature: Incyte ID No: 700160777H1
aggtcgacatgtcgtctccgccgccgccggtgaagctgatcggcttcttcggcagcccgtacgcgttccgcgcggaggcggcgctgtgcctgaaaggcgtgccgtacgagctgatcctggaggacctgttcggcagcaagagcgagctcctgctccaccacaaccccgtgcacaagaaggtgcccgtgctcctccacggcgacggcagggccatctccgagtccctcgtcatcg

SEQ ID NO: 2551 - DNA, 234 bp, Zea mays
  misc_feature: Incyte ID No: 700160778H1
gtctcgccgctctcgtcctccgcgaagatgccgaagaacaagggtaagggaggcaagaaccggaagcgaggaaagaacgaggctgacgacgacaagcgcgagtcgtcttcaaggaagacgggcaggagtacgcgcaggtgacccggatgctcggcaacgggcggtgcgaggccatctgcgtcgatggcacgcgccgcctctgccatatccggggtaagatgcacaagaaggtct

SEQ ID NO: 2552 - DNA, 237 bp, Zea mays
  misc_feature: Incyte ID No: 700160781H1
atccgatcatttgatagagaataaacttttgccactaaagtatgtcaagtttcaaaatgttcgcagtctgactatatttattgaggacaaccaaagtggaagtgatgtctccaaaattcacaagattgctctttatggaacaactgtggacacgacaaatatgaaggatctgaagaagatagaagagcactgagacgattttaaggctgagcttattccagtccagtgggtgcatgt

SEQ ID NO: 2553 - DNA, 235 bp, Zea mays
  misc_feature: Incyte ID No: 700160782H1
atagccatccctccgcagcatggaacacaccagatggtgactctgccatcaaatcttcctgaacatgagttccttaatgatcttgaacccttggatggatgcatacacaaccaaatgaagctccacagctatcgccacaggacctgacatcacatgccaagattctggagaacaacaaacaatgggatggtgagaagtgcatcattctgacatgcagcttcaccccaggatcttg

SEQ ID NO: 2554 - DNA, 230 bp, Zea mays
  misc_feature: Incyte ID No: 700160785H1
attgctccggcacaatcatgatctaccccttcgtgtaaataccagaggttaggcaagacttttcttggtaggtggcgaagatgtgtcgtttaagttcactctactgcatttggggtgggcagcatgaaactttgtcaacttatgtcgtgctacttatttgtagctaagtagcagtaagtagtgcctgtttcatgttgactgtcgtgactacctgttcaccgtgggctctg

SEQ ID NO: 2555 - DNA, 194 bp, Zea mays
  misc_feature: Incyte ID No: 700160790H1
  unsure 84: a, t, c, g, or other
tcgtccctcgccccatcgcgatggcccggatcaaggtgcacgagctgcgggggaagagcaaggcggatctgcaagcgcacttanaggagtttaagtcggagctctccctgctacgcgtaccaaggtcaccggcggggctcccaacaagctctccaagatcaaggttgtgcgcacctccatcgcgcgcgtgctga

SEQ ID NO: 2556 - DNA, 226 bp, Zea mays
  misc_feature: Incyte ID No: 700160792H1
cgtcaagatgtccgcgccggcagagaaggtgctggcctcctcgctcgtggaggtggtcgacatcatccgggaggccaaggacaggatggccgtcgagttctcccgcttcgctggggaggagacggaccaggacccgttccagatgaccttcaactacgagtccatctacgtctccgactggagcaagctcggcttctccgaggtcgactacggcttcggcccgccc

SEQ ID NO: 2557 - DNA, 198 bp, Zea mays
  misc_feature: Incyte ID No: 700160795H1
cctctgcccccatctgtagtgtggtctgcggccaagagcccggggaaacgatcgagacgatatgtgtgggggagcaatccttgccggactcatcccagcgcgggtgcaccggccgctgaccgccgccacgctctgggcggcggccctgagtgggaccagtaccgtcggcaagtggaaggccgatgcagccgccgctac

SEQ ID NO: 2558 - DNA, 268 bp, Zea mays
  misc_feature: Incyte ID No: 700160801H1
agctatccttagcaggttcccagcaaatgtagcagttcaggtcaccaaggacaagaaggaatttagcatccatttggactcttccatcgcagcaaagcatggagagaacacatcatctcttgctggttttgatatccagactgttgggcggcagttgcatatattctccgtggggagacaaaaatcaagaatatcaagaagaacaaaaccacaggagggttctcagtaactttcctgggcgacattgtggcactggactgaagattga

SEQ ID NO: 2559 - DNA, 266 bp, Zea mays
  misc_feature: Incyte ID No: 700160804H1
ggcacaggtctatgaacaatcacttattcagagcaacggaacgaaggctggcgagagcgctcatttcatgcagatatatcgtagtcgtgaagtgggccagtcttatgttacatccatcgcaacaacattgctagccacgctgcatgctatgtggctagtgataagaatcagaccacaagcgatattctgcaacggtccagggacgtgctttcctctatgcatctcagctttcgttctgaaggtgcttggcttgggatggtcatcca

SEQ ID NO: 2560 - DNA, 266 bp, Zea mays
  misc_feature: Incyte ID No: 700160805H1
  unsure 14, 42, 45, 170, 172, 215, 258, 263: a, t, c, g, or other
gttgtattggaganaagcttcagcaactgtgaagagcaggcngtngctgggggcgttcaaaaggctctgctgtgtttgattcggcaaatgctttatcacaatcggtgcaaacttagctgaatgctaccgccccacttgtttgaaaaggacgtctgcacttgagttcaacngngtaaacctgggagctttggatggaggacttgtggatccttgangcgcatttgttgcaaatgctttggattgaagcagagcaatgtnccatncca

SEQ ID NO: 2561 - DNA, 265 bp, Zea mays
  misc_feature: Incyte ID No: 700160806H1
aacccagtcggcaggcgtgacccgatgctctctcgtcgtcggatcgtcgccaccgtctcctccgcgtcgtctacaccgacatggacgaccggcagtatgccgaactgaccaaggcaggtttgggcgtgctggccttcaactcgggcctcgccatctacaactcctggggcgacgcgagctccgtcgcgttcgtgctctccgcggactccatcctcgtgctgctcttcctctgcctccgtgagctggagtgcaggggcggccgggg

SEQ ID NO: 2562 - DNA, 267 bp, Zea mays
  misc_feature: Incyte ID No: 700160807H1
  unsure 179, 264-265: a, t, c, g, or other
cgacggagagcttgatgttcctggcgcacttcgtcggcgacgtccaccagcctctccactgcggccacaccgacgacctcggcggcaacaccatcgtcgtccactggtaccgaaggaagaccaacctgcaccacgtctgggacgtgaacgtcatcgagacggccatgaaggacttctanggcaacgaccagagcaccatgatacaggccatccagcagaacatcacggaggagtgggctgatgaggagaagaagtgggaggccnncc

SEQ ID NO: 2563 - DNA, 267 bp, Zea mays
  misc_feature: Incyte ID No: 700160808H1
cattgattgccaccctggccattggaggtccgcacaaagataggtggtttcattagagctgtattttctgttttccaagacttggatttctcatttcttgagatgaacccattcaccttggtaaatggtgaaccgtatcctctggatatgagaggagaactagatgacacagctgctttcaaaaacttcaataagtggggcaatattgtgtttcccctaccatttggaagagttctcagtccctccgaaagttttatccatgaactg

SEQ ID NO: 2564 - DNA, 268 bp, Zea mays
  misc_feature: Incyte ID No: 700160810H1
  unsure 14, 98, 245: a, t, c, g, or other
gcagtatgaatggnatgctagaacacaaattacaatgtggtttgacaacactgagacaaaagcaagtttattgcgcgactatgcaaacaagtactggngcggcctgctgcaagattactatgggccaagggccgccatctacttcaagcacttgttattaagcatggagaacaatgcacctttcgccctcaaagaatggaggagggaatggatcagtctcaccaacaactggcagagcgataggnaggtgttttcaaccacggctaca

SEQ ID NO: 2565 - DNA, 264 bp, Zea mays
  misc_feature: Incyte ID No: 700160812H1
aggcccgttcgcacgaatcactgctctgctttcaccccccgcatcgaacctcacccccgatctgatcgaatcgaaggctgcggcggcgatgggcggtgaccatggcggtgggcacgccggcggcgacttccgccagaaggtatggagcatgacgggcggcccctactgccgccccgtccactggcgccgtaacaccgccatcgccatgttcggcgtcttcctcatctgcatccccatcgctatgaagtccgcagagtcgagcaa

SEQ ID NO: 2566 - DNA, 152 bp, Zea mays
  misc_feature: Incyte ID No: 700160814H1
  unsure 2, 11, 25, 33-34, 37, 45, 58, 97, 100, 114, 121, 134, 136, 144, 148, 150: a, t, c, g, or other
antagaaagtntttcctcataaaanaataagtnntanatattgantttttggcatgancttctaatggactacacattcgaaatactttcgtaaaangantattttgtgttgcntattganaacattgcctaantnaataagtnaaananta

SEQ ID NO: 2567 - DNA, 266 bp, Zea mays
  misc_feature: Incyte ID No: 700160815H1
  unsure 79, 84, 130, 151, 167, 169-191, 217: a, t, c, g, or other
atgctggacaagctgtgggacgacgtggtggccgggcctcgcccggagacgggcctcgagaagctccgcaaggccaccnccgcncgcccgctcgtcatcaacaaagacgcggacggcggcagtacaagcnggcgcagtcgacgccgtcgancccgacgacgccggtnannnnnnnnnnnnnnnnnnnnnnncgcggcgccggcaacgtgtggcgcangtcttccacccggggagcaacctggccaccaagggcatgggcgccaact

SEQ ID NO: 2568 - DNA, 129 bp, Zea mays
  misc_feature: Incyte ID No: 700160818H1
  unsure 2: a, t, c, g, or other
anatcggtcacttttgagttctcactcatggctatttctgaggttattttttcgtctatttctaaattcggttcacatgtatacaacgaaatggccatttcttacgattatttaccaagccattcagtc

SEQ ID NO: 2569 - DNA, 259 bp, Zea mays
  misc_feature: Incyte ID No: 700160819H1
gatacttctgctgttgcggagagttctgcagcttcagctcttatgcccgagagtttacagcctacctatccgatgattgttccagcttatttctcaccgttcttgcaattctcagttcctttctggccaaatcaggaagatggaggtgatctgcctcaagaaacgcacgagattgtcaagcctgttgcagttcattccaagaatccaattaatgttgatgaacttgtgagcatgtcaaagctaagcataggggagcctg

SEQ ID NO: 2570 - DNA, 260 bp, Zea mays
  misc_feature: Incyte ID No: 700160821H1
gtggtgacgggactgtcccattacctccaagcatggtgcatggagctgaaaggccccgtgttcctggcgatgacgaacccgctctgcttcgtcttcaccatattcagctcctccttcttcctgggagagatcgtgcacctcggcagcatcttgggtggagctctgcttgtggccggcctgtacagcgtgcactggggtaagctcaaggaagacaggaggtctgaggcggcggaacaggagaagaccaagccgcaggaaga

SEQ ID NO: 2571 - DNA, 261 bp, Zea mays
  misc_feature: Incyte ID No: 700160823H1
  unsure 148, 200, 253: a, t, c, g, or other
gcgccgcgccgacaacatcaccgacaaagtgcggaggattccatgtctgacagtttccagacacacgacttagacatcgacaacgcctccgagctacataattgctacggtaacaacatggtgcaagggcaggccatgaccgccaganacgacattggcgtcgtgacggtgaaggaggacaacgactggttcaccgacangaatctggatgatctgcaggcgtcctacaacatggcccatacggtgaatccgntcccggcc

SEQ ID NO: 2572 - DNA, 261 bp, Zea mays
  misc_feature: Incyte ID No: 700160825H1
tgttgtttggcttctcgacctacgcttcatcaccggcgctgcagcaaattgaacggggctacatcgcaacgcaacacacaagattaactgcatgtgccatatgaagacctcctgcctcatcacggtgtttgtatataagatcaactgcagtgcctacacggtggactgagtatttgtatgatgcgaaggtcactgttcagcatcgtcagtatgaaatggctatggccttcaaagctttctttcttggtcaccggacaggga

SEQ ID NO: 2573 - DNA, 72 bp, Zea mays
  misc_feature: Incyte ID No: 700160826H1
  unsure 11, 34, 55-56, 63, 66, 68-69: a, t, c, g, or other
gtgcgttcggnacttataataataagcacatganattttgcttcaggtgcaaaanncaaaaanaananncga

SEQ ID NO: 2574 - DNA, 262 bp, Zea mays
  misc_feature: Incyte ID No: 700160827H1
  unsure 27, 37, 50-51, 53-54, 87, 119, 136, 141, 148, 166, 214, 220, 248: a, t, c, g, or other
ggaaagctctccatttcctgttcgtcnagtcggagancaagacaccgggnngnntcgcggcgaggcccgtcctcacgagctactacnagagcaaccacttcaggaaccgcccgttcgangcgtacaacaactacangagcnccacggnggccatcctctgcgcggncgcgttccagagcatgtacgcgcagatggtgtgcgggctgtgccagcngcaggncgtgctgcgcgtgggcgccgtgttcgcntctggcctcctccg

SEQ ID NO: 2575 - DNA, 260 bp, Zea mays
  misc_feature: Incyte ID No: 700160828H1
  unsure 30: a, t, c, g, or other
cgtttaaagagcagtctttccttgatcggnatcctcgccaggttcaaggagttgtcaacgatgctgatggaagcaaggtcgcaacattgatggggaagtgggatgaaagtatgcattatatcatcaacaatgatgcctccaagaccaactcccatggttcacatgagggttctggtgccactttgctatgggagaaaaacgagcctccagtcaatcccactcgctacaacttgtccacatttgcaataacattaaatgag

SEQ ID NO: 2576 - DNA, 262 bp, Zea mays
  misc_feature: Incyte ID No: 700160830H1
  unsure 78: a, t, c, g, or other
cgcgtccgctgtgtgctctctcgctctctcggcggaagttggcgacgactgggcgaccgccgccgccgtacgccaggngctcaggtctccgtcagacccttcgccaggtcttcttcggcggcgagcaccgccagggtgtgcacccaatcttcttcactgggtcctccgctgcttctagtcacgcatctaaatccggagttgccagcattcgcttgaggtgccggaccacagcacaccatcatgcaggctagcgataggttca

SEQ ID NO: 2577 - DNA, 262 bp, Zea mays
  misc_feature: Incyte ID No: 700160831H1
catcgatatcatccagcaggccgccaactacaagcagctcaagaagggagctaacgaagcgacgaagaccctgaacagggggatatcggagttcgtagtgatggcggcggacacggagccgctcgagatcctcctccacctccccttgctagctgaggataagaacgtgccatatgtatttgttccatcgaaacaagctcttggccgtgcttgtggtgtgacaaggcctgtcattgcttgctcagtgaccagcaatgagggt

SEQ ID NO: 2578 - DNA, 264 bp, Zea mays
  misc_feature: Incyte ID No: 700160832H1
  unsure 98-127: a, t, c, g, or other
ctgattttgtggaacgaagcgatggctcgcagcggcgccgtggtttcctgcatgctgctcctggtggtggcggcgcaactgctcatggtgatggccannnnnnnnnnnnnnnnnnnnnnnnnnnnnngcgaccaacgcggagctggacgccggctgctgtggcaggtgacctgccactacagcaactgtaattgccgcacttgcccgatatatggctgggcgtgctgcagcacttgctgctagctagctagctagctagtgtga

SEQ ID NO: 2579 - DNA, 253 bp, Zea mays
  misc_feature: Incyte ID No: 700160834H1
  unsure 243: a, t, c, g, or other
atctcagccatctaccactacggcttcgcaaaccttatgatgcgcaggtatgttgaggccactcgtgaattcaacaagattcttctgtatatcctcaagtacaagcagtaccaccagaattcccctcagtatgatcagatactgaagaaaaatgagcagatgtatgcattgttggcaatttgcctatctttgtgcccacagaacaagctcattgatgaaaatgttagcacccagctgaaaganaagtataatg

SEQ ID NO: 2580 - DNA, 253 bp, Zea mays
  misc_feature: Incyte ID No: 700160837H1
gatggaccaaggtgtcataggcattgacctttctggcaatccagttgtgggggaatgggaaacatacctgcctgccctacaacatgctaaaaatctgggaatccccgttacaatccactgtggagaggtggcgaaccggaaggaaatccaagcagtgctggacttttgccctcagaggctgggtcatgtatgctgtctgaatgatgtagaatggaagaagctcaagtctctgatgattccggtagagatatgt

SEQ ID NO: 2581 - DNA, 255 bp, Zea mays
  misc_feature: Incyte ID No: 700160840H1
cttcagtccatatggagagcttctctatgtcaaaatacctgtaggaaagcgctgcgggtttgtccaatattctaacagggcatcagctgaggaggccataagggtgctaaatggaagccagctgggaggtcagagcataaggctctcatggggccgtagccctgcaaacaagcagcctcagcaagagcagagccaatggagtggtggcggctattatgggtatccccaaggatacgatccatatggctatgctcg

SEQ ID NO: 2582 - DNA, 257 bp, Zea mays
  misc_feature: Incyte ID No: 700160841H1
gtaggacatggcagagagcatggggagagacggtggtgatggtgagctcaagctgctggggctgtgggcgagcccgttcgtagcgagagcgaaactcgcgctaccagatcaagggcctaagctacgagtacgtcgaggaggatctcggcaacaagagcgagctgctgctcagctccaacccggtgcacaagacggtgccggtgctgatccacaacgggacgccggtctgcgagtcgacggtcatcgtccagtacatc

SEQ ID NO: 2583 - DNA, 254 bp, Zea mays
  misc_feature: Incyte ID No: 700160844H1
  unsure 173: a, t, c, g, or other
gcaacaaggcaccacacctcttcctcctcttcctcctcctagcacagctagcgcctgctccccttcgtctgtgatcatgtcttgcagcagcggcaagtgcaactgcggctccagctgctcctgcggcagtcatgcaactgcatgtcccctgacgtggagaccgccgccgccancagcatcaagaccatggtcctcgctgcgccgaccaccaaggccagcgccggcggcttcgaggcggccaccgagggcggcgg

SEQ ID NO: 2584 - DNA, 255 bp, Zea mays
  misc_feature: Incyte ID No: 700160845H1
  unsure 16, 47, 60, 83: a, t, c, g, or other
accgatttcagttgcntggacggttgatgtgccaaaggttattggcnttgtaaagaagcngctcatggcaccatgagcaaggnaccgccatttagcgacatcaatgctctctgatgcccaagaaaatttggcaagtacagagccactctcccagctgcattatacttatttcctggacctggaaagcttcctgttcctccactagtaagaggatcaccatggttcttttagttgaggtcctaatgatttagatcg

SEQ ID NO: 2585 - DNA, 130 bp, Zea mays
  misc_feature: Incyte ID No: 700160846H1
  unsure 39: a, t, c, g, or other
gtttttgcaaaactaactctgaacggtgttctgttagantcatgtgcacacatgatggttgagatgtgtctatgatgttcattgtgacgaacgattcttaaaaatctcatcggctttagttgaattgaac

SEQ ID NO: 2586 - DNA, 193 bp, Zea mays
  misc_feature: Incyte ID No: 700160850H1
  unsure 142, 169, 172, 175, 177, 182: a, t, c, g, or other
actttttggatcccaaccaaatgtcagctgctgcatatttttcaagttacctggcaggagaggccgtgaaattggtctgagtttcctctacctcgtgggtggctattattcctttgtcagctccatggcgttggcaccttanagggccttgtatgccatggcgaccatnggntananatgtngcattcccaga

SEQ ID NO: 2587 - DNA, 168 bp, Zea mays
  misc_feature: Incyte ID No: 700160851H1
  unsure 67, 107, 131, 137, 143, 146, 157, 164: a, t, c, g, or other
ccctcccgaggctacagaaccagttcatccaggcgcgaatggcggcggcgaggagcctgcttctgangcacctccgcttggcggcggccccgtcagcggcgtccgtnaggccgacggcgtcgttgcatgangccttntggggncancggtggatgtntccgaanaatc

SEQ ID NO: 2588 - DNA, 143 bp, Zea mays
  misc_feature: Incyte ID No: 700160852H1
  unsure 115, 135: a, t, c, g, or other
cctgcatgccactgtgtcaaagttattccttgacttctcgaggagcaagacaaacgaagacaagcctataaagtttgcggttgcctataatagaaggggcattgatgagccaggnaggacagtaatgaaggttcnaaccagcg

SEQ ID NO: 2589 - DNA, 282 bp, Zea mays
  misc_feature: Incyte ID No: 700160853H1
  unsure 53, 123, 129, 135, 173, 192, 196, 233, 235, 245, 247, 249, 254, 264,273, 275: a, t, c, g, or other
atgttgcgttgcatgagattgatgggaacgtggtaaggttaaagctgcaaggngcatgtggttcatgcccggcttcagtaacaacgatgaagatgggtattgaacggcgcttgatggagaaantaccanagattnttgcaattgagcccattgctgatgaggaaactggcctngagttgaaccaagagaacntganaaggtacttgacgagattaggccataccttgctggcncngaagtgccancncnaattntcccaatcgnggacctatngncaagttg

SEQ ID NO: 2590 - DNA, 286 bp, Zea mays
  misc_feature: Incyte ID No: 700160854H1
  unsure 2, 126, 172: a, t, c, g, or other
anagggaggaccaccgtacaataatacagttgctgactatcagaaggtactggaaccactgggtttgaagtctgttcttatggaagacaatgagctagccattaaaccacggaagggatgtgaganaattgggcggtggaagagatgcgcacaccaatcatctctgtgaganaaagcagtggtattttcctaaacaaagaaatagaagaagaatagaccatgtagctgcctcaattatcggatacttcggtgctcctgctccgtcacctttagtcgtccatgaatt

SEQ ID NO: 2591 - DNA, 283 bp, Zea mays
  misc_feature: Incyte ID No: 700160855H1
  unsure 36, 111, 133, 151, 154, 159-160, 192, 198, 207, 224, 226, 230, 236, 248,254-255, 258, 261, 269, 271, 282: a, t, c, g, or other
gagccatgtgggcatggggcgtgatccatgattgtnatgcaactggattccaccctcatgaggagcccctagatggaacaccaatctatgagcattgctcccatgtgtacntgaacccaaatgtcaggtttgngatgacagacctacgtgnagnatgannagcgagattgacgactgttgcagattccaaancccacnatgacttgngcatatctcatctggtncntccngtggtncacaattttttnttgaannggngtnttttttancnggagggagcgnt

SEQ ID NO: 2592 - DNA, 286 bp, Zea mays
  misc_feature: Incyte ID No: 700160856H1
  unsure 32, 41, 52, 142, 171, 200, 248, 252, 255, 277, 282-283: a, t, c, g, or other
cctcgtcctcggtcctcctgctgctcctggcngccgccttngctggcatgancgccaacgccgccaccttcaccatcaccaacaactgcgggttcaccgtgtggcccgcggccaccccggtgggcgggggcacgcagctganacccgggcgggacgtggaccgtcaacgtnccggctggcaccagctccggccgcgtgtngggccgcaccggctgctccttcaacggcaacagcgggagctcccaganaggngantgcggccgcgcgctggctgcanggttnnggg

SEQ ID NO: 2593 - DNA, 177 bp, Zea mays
  misc_feature: Incyte ID No: 700160857H1
  unsure 18, 50, 68, 72, 135, 142, 174: a, t, c, g, or other
gtgcagtacggcctgaancgcgccggggaagcacctgggcgtcgtcggcntcggcggcctcggccacntggncgtccgcttcggcaaggcgttcgggatgaaggtcaccgtcatcagcacgtcgctgggcaagcnggacgangccctcggccgcctggtgcgacgcttcctggntag

SEQ ID NO: 2594 - DNA, 285 bp, Zea mays
  misc_feature: Incyte ID No: 700160860H1
  unsure 273, 277: a, t, c, g, or other
ctctcgcccaccaccacaccacaccaccggcggcggcggcgacccagtcgagaacacgaaggcgatggcgacagcgctgaaccgcgggctccgctccgggctccgcctcctcgccgccggcgccgaggcgtccaagccagcttctcgtggattccatgccaccggcgtgaagagaatgggagggcatggccatgatgagccatactacatccatgccaagcacatgtataacttgcacaggatgaagcatcagggtttgaaggtgacactctncgtnctgggagc

SEQ ID NO: 2595 - DNA, 286 bp, Zea mays
  misc_feature: Incyte ID No: 700160861H1
  unsure 206: a, t, c, g, or other
aaagaagaggaagagcagaagcgggtacaaaaggatcaagtgagaagacaagagaggaaaaaccgtgatgggtttcgtaaaatgttggaagaacatgttgctgatggcacacttaatgcaagaactcggtggcgtgattactgtgcacagataaaagattcacagtcctacttggctgtagcatcaaacacatctggctctacacngaaagagttatttgatgacgtgatcgaggaacttggcaaacagtatcaagaagacaagatccaaattaaagaagtggtga

SEQ ID NO: 2596 - DNA, 254 bp, Zea mays
  misc_feature: Incyte ID No: 700160864H1
  unsure 220, 248: a, t, c, g, or other
tgtctcaccgacggattctggagtcgctgcctcgcctttcaaagcagaatttccttcccaagagcaaccacctgctgaacccgtcagcagaaccagcgctctcccctccaaaggcgaacctgctccagagctaccggctgctgcagagaagatgaaggagcaagaatccgtggatgaagacttcggggacttccaggctgccgggtgatatcatgtatcntgtacatacatcatgttaccgagacttnttttct

SEQ ID NO: 2597 - DNA, 147 bp, Zea mays
  misc_feature: Incyte ID No: 700160866H1
  unsure 102, 128, 133, 137, 141, 145: a, t, c, g, or other
cgattcctgcaattcgccgccatcgttcgctgagcttgagcgcgtctgctgcctgccaccaccgctctctgctgctctgttcgttctcccgccggggcagangagggcggggaggcccgttgagcgancctcngtcngaanggantc

SEQ ID NO: 2598 - DNA, 140 bp, Zea mays
  misc_feature: Incyte ID No: 700160867H1
  unsure 66, 126: a, t, c, g, or other
cacttgatgcgcgcccgtgccatgccatggatggcttgctagtgcagacgtactgaggactgagcngctagtgtagcaccggcatttgaaggtatatcgatatatatatacacacgaaaagatttngggtgacaaaaaaa

SEQ ID NO: 2599 - DNA, 278 bp, Zea mays
  misc_feature: Incyte ID No: 700160869H1
  unsure 52, 262, 272, 277: a, t, c, g, or other
ggctgaagggcgtcgagtacgagtacgtcgacgaggacctcgccaacaagancgccgacctgctccgccacaacccggtgaccaagaaggtgcccgtgctcgtccacgacggcaagccggtcgcggagtccaccatcatcgtggagtacatcgacgaggtctggaagggcggctaccccatcatgccgggcgacccctacgagcgcgcccaggcgaggttctgggccaagttcgcggaagacaatgcaagctgctctgtacncgatttcaangcgang

SEQ ID NO: 2600 - DNA, 238 bp, Zea mays
  misc_feature: Incyte ID No: 700160870H1
  unsure 28, 35, 46, 65, 76-77, 120, 122, 125, 128, 156, 176, 179, 182, 186-187,194, 197-198, 202, 205, 210-212, 216, 220, 224, 231: a, t, c, g, or other
tcctgctcaacatgcgcgtgcacggacngatcgcngtctgcgggcncatctcgcagtacaacctngcggacggggnnaaggacgccgtgcgcaacctcgccgccgtcatctccaagcgcntncgnctncaggggttcatcgagcccgatcacaagnacctctacccgcagtacgangcntgntggnngcgtagnttnngganggnacgtnnnctangtcnaacnacttcgngaggggc

SEQ ID NO: 2601 - DNA, 283 bp, Zea mays
  misc_feature: Incyte ID No: 700160871H1
  unsure 150, 157, 169, 174, 195-196, 215, 234, 246, 250, 256, 260, 271: a, t, c, g, or other
gcttgcactgaagtttttgagaactttgcttgtacttgaaatgtcggttggacaacattctatagatatattctagttacttgttttttttggattttttttttcttactcttagagcttgatccggagctacaaaaccaggaataagangggcganccatactcctanaggcnctatttggggacccccatttnnccaggggtttccatttccncagggggaaaaggaccggntttccctggggnaaangaaaancccngggaaaaaagnggggaaaagggg

SEQ ID NO: 2602 - DNA, 139 bp, Zea mays
  misc_feature: Incyte ID No: 700160872H1
  unsure 87, 119-120: a, t, c, g, or other
ggaagcttcactggtggagatcgtgaccgcgatcagggaggccaaggaggctctgtcgtcgaggttcctcgactggttgagcggcgncgccaaggagaaccactacaacgtgtcgctgnnactacggcaccctcgtcgt

SEQ ID NO: 2603 - DNA, 275 bp, Zea mays
  misc_feature: Incyte ID No: 700160874H1
  unsure 126-155, 182, 206, 224, 249, 252, 261, 263-264, 270: a, t, c, g, or other
atcaaggtcgagtcctactggccggccctcttcgccaagctcctggagaagcgcaacgtcgaggacctcatcctctccgttggatctggtggcggagtgctccagttgctgctgccgcacctgctnnnnnnnnnnnnnnnnnnnnnnnnnnnnnngtcgaggagaagaaggaagaggccaangaggagtctgatgacgacatgggntcagctgtttcgactgangagaaccccttaaccagccataacnaanttcacttgngnnggcaanaatat

SEQ ID NO: 2604 - DNA, 189 bp, Zea mays
  misc_feature: Incyte ID No: 700160875H1
  unsure 161, 170, 172, 177, 182-183, 187: a, t, c, g, or other
cttcaacctccaatacatggtcatgcctcagtggctatagaatccctctcctttaggatgctgtgtccacaagacaaggttggcagtataataggcaagggtggaaatattgttaaaaccattcaaaatgatacaggctgtgaaaaaagttttcttttatnattaaaaananaaaangaaannaaanag

SEQ ID NO: 2605 - DNA, 277 bp, Zea mays
  misc_feature: Incyte ID No: 700160876H1
  unsure 53, 227, 230, 243, 259, 265, 273, 275: a, t, c, g, or other
gagaaggtacctttggtcaggtgttggagtgttgggataaggaaacaaaaganatggtggccataaagatcatcaggggcattaagaagtacagggatgctgcaatgatcgaaattggcatgcttgagaagcttggtaaatatggtgaaagcagatccagttgtgttcaaattcggaactggtttgactatcgtaaccatatctgtattgtctttgagaggcttggnccnagcttaatgattnccgaggaaaaacaatncccgcncatccccntngc

SEQ ID NO: 2606 - DNA, 280 bp, Zea mays
  misc_feature: Incyte ID No: 700160877H1
  unsure 33: a, t, c, g, or other
acgagatcggcagccactacatcccggacatcngcgggctggaccacagcatccccgccgccacccacggccagttcctccccggcgccgacgacacctgggtgcccaaccccggcttcgaggtccccaaccccttcatgcccggcgcggccactccctgaacacgtacccgcgctggcgaaggtggctctcggtcgatctgatcgtcgagcgccgccgcccgccctgaacgaataatactactagctactctcggtctgctacgtatagctagcttagc

SEQ ID NO: 2607 - DNA, 278 bp, Zea mays
  misc_feature: Incyte ID No: 700160878H1
  unsure 196, 257, 262, 268, 270, 275: a, t, c, g, or other
catttctgaaggagctgtacatcgaaggaaaccacttcagaccaggaaccagatcgaagggaacgcacaaggtgctggaactgcctgacgccgacattctagtctagcaagctcgtttgggggacctgaggtcttggcgtcctgcagtagtagactgctgccgctgacggtaccaggatcacttctgtctgtcgcngtactattccgtggcaaaactacagttgagaaaaaaaagtctcttggaaaaaaaaggggcnaaaanagggantnttagngcc

SEQ ID NO: 2608 - DNA, 283 bp, Zea mays
  misc_feature: Incyte ID No: 700160879H1
  unsure 142, 173, 176, 178, 181, 189, 198, 204, 207, 211-212, 214, 220, 230,232, 243, 255, 260-261, 269, 278-279, 282: a, t, c, g, or other
cgggctatttggatgggagtaccggagacctgaaagagtcccacctgcatgtccatacaagcctgcagctcagaagaacgatgagggtgcgagtgaatcaaaacccctggccgaaccgcacggtgctggtgctgcggcggcngaagataagaaagtggaatgatgcagcaggngcntnaantggtgggncagggtctntgtggntancctnnanacatantttttgtggntngtgatgtactngggggatgggtnaactnnttttgacncccccgggnnttnc

SEQ ID NO: 2609 - DNA, 276 bp, Zea mays
  misc_feature: Incyte ID No: 700160881H1
  unsure 227, 251: a, t, c, g, or other
ctggctttgcagagtcactgcattctttggctgcctccttggcaagctctgtaaagaaggatgaagctgataccactgttcagtttcaacaatgcatcaagatcctggcggacaaagtttatttactgacacgacagagtgctgagctgctagaaacgctattcagctatgcaggcagtacatagaggtatcacaaaagagctggatgagaagaaagagctgattangaatctctacaataaacttcaacnagaaaaacaggccagcaaagagaag

SEQ ID NO: 2610 - DNA, 275 bp, Zea mays
  misc_feature: Incyte ID No: 700160882H1
  unsure 65, 249, 255, 274: a, t, c, g, or other
gattcctgcccgtctcaagaggggcagcggactatgctcggcctgtgaaaacttcacgagcgaancgtgcaacttatctcggcaaggaacagacacaggacaggatcgtggagttccttcatgatgcttgctcccaatcattctcctttgaacagaagtgtgtcgagctgatggactcttatgcgactctcctgtttgccaagatcacggagatcagaccggaagcgtttgcaaacggtaatggctttncagggncaagggtcttctctccggng

SEQ ID NO: 2611 - DNA, 274 bp, Zea mays
  misc_feature: Incyte ID No: 700160883H1
  unsure 148, 209, 235, 237, 244, 271: a, t, c, g, or other
caagaatatgaatccctcaagatcagcgaggcagccgcacagagtagcattaaagaattgaaggatatgattgatgctatgttcagttctgagtcgaccaaaacgtcagcagaagcatcacctcgtgaggccaagggaagcaagatgnaggaaacttctgtggcagcagattatgtgtattctgatgtcgaaagatctactcgtctggncgacataaaaaaccctggaaagcagncnaagaagncaattctcagaaaatttggtgaaatantgg

SEQ ID NO: 2612 - DNA, 131 bp, Zea mays
  misc_feature: Incyte ID No: 700160884H1
gtagaagacgacgccgcgaacagagcctgcttctacgagagcatggacgccgacacccgcctcgtcatgcaggccgtgatccgcaagtgccctgccgtcttcgacgacggcctcacgtcgctcgtcgacgt

SEQ ID NO: 2613 - DNA, 268 bp, Zea mays
  misc_feature: Incyte ID No: 700160886H1
  unsure 171, 200, 239-240, 252, 257: a, t, c, g, or other
aagagccaagtccatgaagttcaaggatggctacatgatctcatctggtcagccagtgaatgagtacatcgactcagctgtgagacacgtcctcctcagacagggtgttctgggtatcaaggtgaagatcatgcttgactgggacccgaaggcaaggttggcccgatcacncctcttccggacctggtgaccatccatancccgaaggagggaggacgagctgcgcctctgttttgaanntgaggttaaggncccanagggtcctcga

SEQ ID NO: 2614 - DNA, 271 bp, Zea mays
  misc_feature: Incyte ID No: 700160887H1
gatttggtcaaccaaaaataactgtctgcataccaggaattcaggacttttatgtcaggagttcctttttgatcccactgataattacgtcagtatcttgagataaagatggatagattggattcagaatagatatggagctgtattcattcgtgtcagtgctcacgtcactgccaattcttctccttcccctgtacttttttcaggcgccggagaaattcttgttccttggcttatactacctgttcttgaatattgtcatccgctattt

SEQ ID NO: 2615 - DNA, 269 bp, Zea mays
  misc_feature: Incyte ID No: 700160888H1
  unsure 173, 190, 206, 212, 223, 240, 246, 248, 260, 265: a, t, c, g, or other
atctgttgtatgctgagtgatgacttgtattctttggcaataatgtgtcatacagtgacacaattgcacatgtggaaggtgaacatggcctaagttaaatatgatatctttctggagataatatctgttgaagaaagggctagattttttttttatagttttagaatccttgngatatgattgttttccncggtcatccaaccttngccaanggctttgccantacaaaaacatcgggantcccancnggtatagccaanaaagnaagg

SEQ ID NO: 2616 - DNA, 273 bp, Zea mays
  misc_feature: Incyte ID No: 700160889H1
  unsure 61, 64, 97, 160, 168, 172, 197, 205, 207-208, 210-211, 213, 215, 231,239, 242, 253, 259, 267: a, t, c, g, or other
tggcagagagcacctactccagtttttttctcagttctcagttctcactcccatggccgcngcngcctgcaacccagtggctccttccgggcctgtnccgttcaaggacgtcgacgacggcagtgttccagagcaaactcccaaggaggagttcggtganctcgtggncgcnctgccgagcaaggcagcaattcatnctgggaangnncnngnanaaaggctttggctgcnggagcacnagntgcggggaacnaatagngttctagngcagct

SEQ ID NO: 2617 - DNA, 271 bp, Zea mays
  misc_feature: Incyte ID No: 700160890H1
  unsure 149, 173, 256-257, 261, 267: a, t, c, g, or other
ggagcaggagaagctttcccacagatattaaatgcgctgcccttgacagacagcactcggagttttcatgatgggtttcataatcctcccatgatgatttaacatttgtttgatcaatttcagttcaacgccttttcatcgttccatangcatatatggtatccgtgtctggnaaacttattttgaggcttgctaaatatgtaccttttgtctctgaagttgttaaataaagcaaattaacttccaaaaaaaagannaaanaaaagngggc

SEQ ID NO: 2618 - DNA, 125 bp, Zea mays
  misc_feature: Incyte ID No: 700160891H1
gctgatgagaggttggtgacgattcttggctactggctactgtaattagcttgagctactattctggttgcagcatctgtggctgaacacgagtaccatatctgagtgtcataagtcatgttgcg

SEQ ID NO: 2619 - DNA, 256 bp, Zea mays
  misc_feature: Incyte ID No: 700160892H1
  unsure 2, 29, 31, 36, 117, 194, 204, 206, 208, 210, 213, 217, 221, 224, 237,240, 243, 247, 249, 252, 254: a, t, c, g, or other
angctactgcaactcgagcaacacgcagngnctgtngttcttgttgacctcgctgacgtagacagaaatggccggtcaacaagaacaacagctactgcaactcgagcaacacgcagnggccgtgcgccccggggaagaagtactacggacgcggcccgctgcaggtctcgtggaactacaactacggtcccgcngggaaaacgncntntngancggntggnganccggatatggtgncgnagncccntngtntntt

SEQ ID NO: 2620 - DNA, 125 bp, Zea mays
  misc_feature: Incyte ID No: 700160893H1
  unsure 47-48, 86, 88, 92, 95, 97-98, 112, 116, 119, 121, 124: a, t, c, g, or other
gaaccgacgtgtgcgcttctgtctgtgtactctctctatgttgtaanntgtgggtgctttgatccagatgtattcgctcgtgaaananaaanaanannaaaaaaggaaaaanaaancananaana

SEQ ID NO: 2621 - DNA, 273 bp, Zea mays
  misc_feature: Incyte ID No: 700160895H1
aaaacaagaaacacttgcaactttactagaaattatggtcagactctctttctctgtgttcgtttgattgttgctctggctgtctcctgctaaccaattttgtgggaaattcaacctttgaagcatcaatgtggtgaataatttctcaaaccctcagtatgttttccctaatgctggataaggcgctctcaaaaagcgaggctgtggtcagcgccttcgcctccatgacgccgatgctcatcggctccgtcgtgctggactccacgcaggggt

SEQ ID NO: 2622 - DNA, 71 bp, Zea mays
  misc_feature: Incyte ID No: 700160902H1
  unsure 2-3, 69-70: a, t, c, g, or other
annctgcgaacccagagttgcagaacccgtactgctcgtttaagctcatggtgaactacgagctaaaanna

SEQ ID NO: 2623 - DNA, 101 bp, Zea mays
  misc_feature: Incyte ID No: 700160903H1
agtttgatgatatactgaattcctcttcactagatggtgcttgtgacaagatcaaaagcttagccaaggctaaagaacttgattcatctctaattcttctc

SEQ ID NO: 2624 - DNA, 148 bp, Zea mays
  misc_feature: Incyte ID No: 700160904H1
  unsure 135: a, t, c, g, or other
gtgatgtagtaacaaagaagatcatggaatgggttatgagtgatgctgaacttgttaagtcttttggtatatttgtacggctctccaatgatattgtatcaaccaagcgtgaacaaagagagaagcattgtgtcnccactgttcagtg

SEQ ID NO: 2625 - DNA, 134 bp, Zea mays
  misc_feature: Incyte ID No: 700160905H1
gaaataacaatgctcatggtctatcagtgaatgcaatctttggtttgtgctttttttttgtgttgttctagcttgcccagctgtttggaataccagtttggctctgccatgccatgattagatgaatgtgcaga

SEQ ID NO: 2626 - DNA, 181 bp, Zea mays
  misc_feature: Incyte ID No: 700160906H1
ggcagcagcacaagcaagaaccacacctcctcccttcgcctgtgatcatgtcgtcttgctgcggcggcaagtgcgggtgcggctccagctgctcctgcggcagggatgcaacggctgcggtatgtaccctgacgtggagaccgccgccaccagcagcgtcaagaccacggtcctcgccgcg

SEQ ID NO: 2627 - DNA, 119 bp, Zea mays
  misc_feature: Incyte ID No: 700160907H1
atggattcttcactccagacactgcaatggcaaatgagttctttgcgaaggcaactgaatgtttccagaaggctgctgatgtggaacctgcaaatgagctgtacaggaagtcattagac

SEQ ID NO: 2628 - DNA, 195 bp, Zea mays
  misc_feature: Incyte ID No: 700160908H1
gtctgtctccaactcactagtactcagccgccgcaatcagggacaggtagctcgagcgcgcgctccacctgctccgacgcgatgcgggccaagtggaagaagaagaggatgcggaggctcaagaggaagcgccggaaaatgaggcagagatctaagtaggcgcatcttgtgaccgaggatggcgagcttctcctg

SEQ ID NO: 2629 - DNA, 261 bp, Zea mays
  misc_feature: Incyte ID No: 700160911H1
  unsure 249: a, t, c, g, or other
attttctattacattctttggtgagtggggtgacaagagccagattgctactattggcttggctgctgatgaaaacccatttggtgttgtcctgggtggaatcatagcgcaagcactctgcactactgctgctgttcttggtggaaagagcctagcctcccagatatccgagaagatggtcgaactgtcaagcggagtgctcttcctgctgttcggtatcatgtcattgctctctggaccaggagaatngtaatccctgct

SEQ ID NO: 2630 - DNA, 262 bp, Zea mays
  misc_feature: Incyte ID No: 700160913H1
  unsure 56: a, t, c, g, or other
gggccttactgggatgtcccagtaggaagactggactccaagaaggcgagcctganacctagcaaacagcgacatccctacggcccagcaaggcctcctcacgctcattgccaagttctgggagaagggccttgatgccactgacatggtggccctcgtcggatcccacacgatcggattcgctaggtgcgagaatttccgggacagaatctacggcgacttcgagatgacgtccaagtacaacccgtcgtccgaggcctac

SEQ ID NO: 2631 - DNA, 263 bp, Zea mays
  misc_feature: Incyte ID No: 700160914H1
atcggtgttcccgctgatctaaaatacattgatccaacatatatggttcgggcctgccgggcaaatgcatctgatgctattctctgcaccgtacttgggcaaaatgctgtccatggagcatttgctgggttcagtggcatcacgtcaggtgtttgcaacacacattatgtctaccttcccatcacagaggtcattacaacaccaaagcacgtcaaccccaacagcagaatgtggcaccgctgcctcacatccactggccagcc

SEQ ID NO: 2632 - DNA, 117 bp, Zea mays
  misc_feature: Incyte ID No: 700160917H1
gaagatttggaagaggatgaaattgcaaattatgctttaaacctcgaaaaggtcttggctgaacttccagctccagttctaaatggtacaacacttacagtcgaggattttcatcaa

SEQ ID NO: 2633 - DNA, 179 bp, Zea mays
  misc_feature: Incyte ID No: 700160920H1
  unsure 178: a, t, c, g, or other
aattaacacctttgagctacctcttctgaaaagcaaggctgtggttgatgcaaacattagggagaaagaaaagctttaatgagctgcaggttgagattgagcggcagatcttgcatgctaagactgatattgaggaccttaagaagcaacttgagcagagcaagattgaggggcagcnc

SEQ ID NO: 2634 - DNA, 188 bp, Zea mays
  misc_feature: Incyte ID No: 700160921H1
  unsure 143, 149, 155, 159, 187: a, t, c, g, or other
acaagttcgtgggcgaccacacgacgcaggcgttcgtgttcaccgacaaggcagaggacgcgagcgtggtggtggtgtcgttccggggcacggagcccttcaacatgcgggactggtccacggacgtaaacctgtcgtggctnggcatnggcganctgngccacgtccacgtcggcttcctcaaggng

SEQ ID NO: 2635 - DNA, 110 bp, Zea mays
  misc_feature: Incyte ID No: 700160922H1
  unsure 27: a, t, c, g, or other
gtgatctcaacccaagtcgtgcctccnctccggtcacccgtcgctccacgcaaccatgttcgaggaggaagaccagggagcccaaggaggagaacgtcacccttggaccc

SEQ ID NO: 2636 - DNA, 89 bp, Zea mays
  misc_feature: Incyte ID No: 700160923H1
cattttcccgctgtaacggtcctcgtctgctatgaccgaacccgagaaaaaaagtattgttctgtggctgtgctgatcatgccatattt

SEQ ID NO: 2637 - DNA, 256 bp, Zea mays
  misc_feature: Incyte ID No: 700160924H1
gctcctacaaaccaaactggtgatgttcccatgtccagtacacctgctgctgcttgtttgccctctgttaatgtgcctatgcatgaagtcgttactactcatacaccgtcacctattacgcctgtcttgcctacaactatacacttttcagccccagtatctgctcctgcaattgcccctgagcttgcatcaggggctgttggtgtgcctccacctgttagtgctgtggtacctgagctgtcagaactggatgttc

SEQ ID NO: 2638 - DNA, 243 bp, Zea mays
  misc_feature: Incyte ID No: 700160925H1
  unsure 86, 240: a, t, c, g, or other
ggcgaggacgatggcggacggcaataagctgggcgacgcgcgggacaagctggcggaggcccagaacgcgctggaggacgtggtgncgcagtccgacccgctgctggacgccctcaggacggagctgcaggagctactgaagctgatgaagtcgcaggacgtgtacgagaaacagggccggccctacgccatgtcgtcggagactcgcacgacaggcagcggttcgcggcgaggggcganatc

SEQ ID NO: 2639 - DNA, 258 bp, Zea mays
  misc_feature: Incyte ID No: 700160926H1
  unsure 27: a, t, c, g, or other
acgccgccagcagatgcaggagcagangagggaaaaggcggctcgtagcacccatccatctcatgaagcggatcgggtcggatcggatcggagctcaccttcctccacctactgcttgctgatgtgatgacgcgtctgttacggtttcctggcaaatttgtttcgtcaaagtcgatctctcctccaaagtccaaaacccggttgaaccaggtgccggccgggtcgggacgtactggggagacgatgatatctctgtgt

SEQ ID NO: 2640 - DNA, 234 bp, Zea mays
  misc_feature: Incyte ID No: 700160928H1
ggagatgatgggcgtcctcaggaagatgagatcggctggtacgcacactgacaagaagaaataaagcatttcaagttcatgaatgtggcagccagagattatcaactgtgttttttccctacctctagaaactagacatggcaaagtatttttgaccgaaacattgtttgttagtaatgtattgaaccacctcgtggtattttgccccaacttccaatgcatcaatggtttgtt

SEQ ID NO: 2641 - DNA, 257 bp, Zea mays
  misc_feature: Incyte ID No: 700160929H1
  unsure 114, 143, 157, 207-208: a, t, c, g, or other
ggccgaggagctcgtcgcggagcttcgcctcgcgcggcctccgcgccgtggccgtgacgcgcggacgtctccgatccggacgccgtgcgcgcgctcttcgaccgcgccgaggangccttcgggtccccgcaccacgtagtgtncgcctgcgcgggcntcatggacgccaataccccgcgctggtcgacactgccgtcgaggacttcnncgacacgttcgcggtgaacacgcgcggcaagttctggttgtgcggaagc

SEQ ID NO: 2642 - DNA, 219 bp, Zea mays
  misc_feature: Incyte ID No: 700160931H1
aacttcaccacacaatttgaacttcttgaagcacatgtgttttcaagatacataagcatcatccatgatccatccaggaaggcattattattctgggcgcttgtcatgacgcccctatttggccttttccttggaagggaatgatgctagatcaatgaactgtggggggtggttacactacaccccccaaattgctcgcagataaattatagtaatatg

SEQ ID NO: 2643 - DNA, 117 bp, Zea mays
  misc_feature: Incyte ID No: 700160932H1
  unsure 2: a, t, c, g, or other
gnctcggcggcctcggccacctggccgtccgcttcggcaaggcgttcgggatgaaggtcaccgtcatcagcacgtcgctgggcaagcgggacgaggccctcggccgcctcggtgccg

SEQ ID NO: 2644 - DNA, 103 bp, Zea mays
  misc_feature: Incyte ID No: 700160933H1
gggtggtggccaagagactacaccgctgacggcgattacccagttgacgcaccacggcatggtgtttgtgcccgtgggctacaccttcggcgccaagctgttc

SEQ ID NO: 2645 - DNA, 249 bp, Zea mays
  misc_feature: Incyte ID No: 700160936H1
  unsure 190, 212, 217: a, t, c, g, or other
gttcctgttctactgcgtcgtgatcccactgtctgtcatggtccccgaagtcagcatccctgcctggggaatgttctacattcccactgccatcaccatcatgacagccatcaggagtccttggtctatccatctggtcccaatatggatcctgttcgagaacgtcatgtccatgcaccgaatgcgcgcngcgctgaacggggctgctgganaccangtacgtggacgaagtggtggtcacgagaagtt

SEQ ID NO: 2646 - DNA, 102 bp, Zea mays
  misc_feature: Incyte ID No: 700160937H1
attgcttcagcatccatggcttgatgttggtcccctccgacagcaacctaaaacacggccagagtcagcacagagtccaggtgatggtgtttcagagaagca

SEQ ID NO: 2647 - DNA, 85 bp, Zea mays
  misc_feature: Incyte ID No: 700160938H1
cttaaggctttgtccaaattcccggtgaagttatgccgcctcgtagggctcgtggcagcccgcaaggtcctagtggggattctat

SEQ ID NO: 2648 - DNA, 252 bp, Zea mays
  misc_feature: Incyte ID No: 700160941H1
cttgtctctggtgttcagattgccatttctgcatccaacactggtggtgcctgggacaacgccaagaagtacattgaggctggagtttcagagcatgccaggacccttggcccaaaaggttctgacccttcacaaggcggctgtcattggtgacaccattggagatcctctcaaggacacgtctggcccttccctcaacatcctcatcaagcttatggcggttgaatcccttgtcttcgcccccttcttcgc

SEQ ID NO: 2649 - DNA, 249 bp, Zea mays
  misc_feature: Incyte ID No: 700160942H1
agacgactacttggacccgaccatccctttcccgtgattggtcgaataatatgcctgcccttttttgtgtccttacatgtttggactgttccgatgttgcaacttgcagttctttgctactacaactctatccaccttggatgtcgcgatattgttgatgcaatgcctgggctcatgtcagctgagagctgaccttggcagcttggctgtctgctgaccttggctggaagcacggtttttggatgaatc

SEQ ID NO: 2650 - DNA, 250 bp, Zea mays
  misc_feature: Incyte ID No: 700160943H1
caagactgtaggatggtgcggctaggctcattgatctgtcgcgatatttcacggcacaaaacttggattgcaggggtggatctaggggtgttcgtcacccggataaaatttataaattctttagaaaaacagttaaagttcaagaaaatttgtatcatgtagcaaacctgaccttggtacccgataatattttgggttagattcgccatttattggatggtgggcagccgaatcgagagttcactttggc

SEQ ID NO: 2651 - DNA, 114 bp, Zea mays
  misc_feature: Incyte ID No: 700160944H1
gttgggtgctaagatttctacttgtttaccgttgtgaatttcacaagtgatatctgatcctattactatcatgatgacgtcaaatttgcttctggtttctaccctttggtttgc

SEQ ID NO: 2652 - DNA, 204 bp, Zea mays
  misc_feature: Incyte ID No: 700160945H1
ctgcctaacacgagccacaacgccggctggatttccgggaggagttcctcgtataattttatggagtgacgtgtgtgctcctgatgatgatgccaaaattaatttgaaacaaccgttctcatcttgaactcagaagacggcgtcacgcactctgggaccttcagctagcgtgtggtggtgtccatgcatgaatgaatgcagtag

SEQ ID NO: 2653 - DNA, 254 bp, Zea mays
  misc_feature: Incyte ID No: 700160946H1
gccgcaagtgctatgcgcggcttccgcccagggcaaccaactgccgcaagaaaaagtgtgggcacagtaacgagctgaggtcgaagaaaaggttcatgtccaagattggcgggaaatgatcggcttttgtcattgcgtgacatatatggagcatcagctgaaatttcttagacgcttaataatttttactttaacgccgtggatgtgatattttactgaataaagttgtagtagaaacaaaaaattcgtgctac

SEQ ID NO: 2654 - DNA, 255 bp, Zea mays
  misc_feature: Incyte ID No: 700160948H1
caccgacatcaccgcctcgactaagccggagtacccggtggtggatcggaacccggccttcaccaaggtggtcggcaacttctctgcgctcgactacatgcgcctctccaccatctccgccgtctccgtcaccgttggctacctctccgggatcaagccggggatccggggcccgtcgatggtcacgggcggcctcatcggggtcatgggaaggttcatgtacgctaccagaactccgcgggcgcctaatgggat

SEQ ID NO: 2655 - DNA, 234 bp, Zea mays
  misc_feature: Incyte ID No: 700160949H1
  unsure 62, 159: a, t, c, g, or other
agcaaatagagcacacagtcgagtgtaaaccatccaaccaatcatggcttcgagttccaggngcaccgtgttttcacttcttctcctggtggcgctgctgctcagctgcagcggcatgagcagcgcggcgcggttgctggaagaggcgccgcccaaggnggagcacccacatcctgccgtgccggagctgccagaacctgagctgccgccgcaccctaccgacgtcgtgccgcc

SEQ ID NO: 2656 - DNA, 232 bp, Zea mays
  misc_feature: Incyte ID No: 700160950H1
  unsure 153, 160-182: a, t, c, g, or other
ctcttcagctatcagacggcaagacgatgctgccgctgaggtccgccgccgccgcgccgtgctcggttgcaggacttctgcttcaccgattctcatcctactcgtcctcttctgtctattctgtccgccaccacgcctcgtctgctctctccncccagcnnnnnnnnnnnnnnnnnnnnnnntggtcctcttcccccaattccagcagccgcaggatcagggggtttgcggc

SEQ ID NO: 2657 - DNA, 231 bp, Zea mays
  misc_feature: Incyte ID No: 700160951H1
aacacgcaacgcaacactcgccttcccctcccaaccctccgaaccgaagcagcaaagctagacgatgacgctgacgatcccggacgaggtgcgcgccaaggcggaggtgtacgtgggcgacgcggcggggcaggagaagacgcggctgctcctccaggagacgggcctcccgagcgggctgctcccgctgcgggacatcatcgagtgcggctacgtggaggagacgggttc

SEQ ID NO: 2658 - DNA, 233 bp, Zea mays
  misc_feature: Incyte ID No: 700160952H1
  unsure 30, 159-161, 173, 179, 184, 230: a, t, c, g, or other
gggcgtcgactacgtggacgagagcgaggngctcacccccgccgacgacgcgcacaacatcaacaagcacaacttccgcgtccccttcgtctgcggctgccgcgacctcggcgaggcgctccgcagggtgcgcgagggcgccgccatgatccgcaccannngggaggccggcncgggcnacgtngtcgaggccgtgcgccacgtgcgctccgtcatgggcgacgtccgcncgt

SEQ ID NO: 2659 - DNA, 231 bp, Zea mays
  misc_feature: Incyte ID No: 700160953H1
  unsure 35, 53, 127, 154, 166, 208: a, t, c, g, or other
ccgatactctggccgtagccgagatggcggcagcnatgggggtggcgatcgcnacagccgtgaccgatcaggtccttactgatggccttagttcttgattgagaagtatgtgccatccaggtatganagtctatctactattataaggcttgtnattgtgtctggnactttgttatcctgtagttggagtcgacatgtaccgtgaganatcagctgctttgttatagaccg

SEQ ID NO: 2660 - DNA, 231 bp, Zea mays
  misc_feature: Incyte ID No: 700160954H1
  unsure 2, 57: a, t, c, g, or other
cnaaggaaaactttgagctggctttggagattgacaatggtaatacacatgcgaggnattggctgggaaaaatgcatttcaagtatcatgttcctggtgcttgcaaggcagttggtgctgctttgttggttgaagctgcaaatatgggtgatccagatgcacagtatgaacttggatgtcgactaagaattgagaatgactatgttcagtcggatcaacaggctttccatt

SEQ ID NO: 2661 - DNA, 229 bp, Zea mays
  misc_feature: Incyte ID No: 700160958H1
gttccttcttagtcctaaggataaagacttcattgttaaggagttgaccttatctactctttcaagcctcatatgtgattctgaacattttgttcaagaacaaacattggcacttgtgcacaatcttgttgatggatatgtggtctctgctaattatgtcattggtgaagatggaatggttatggatgctattgcaagacaactgaacaatgcatctgctccgggagta

SEQ ID NO: 2662 - DNA, 231 bp, Zea mays
  misc_feature: Incyte ID No: 700160959H1
  unsure 85, 132, 141, 145, 153, 159: a, t, c, g, or other
accgcaccgtctcggacgcggctgcagctccgagcattggattccgaccaactgaccgagcggcgtgtcagatgatctcgccggngatgtgtcgttcggcgccgcggcgggccgcgcaggtccggcgcctcntgtcgtcgnccgngcccccgncgcacnccggcgctgccgtgcctgggccctgcatcgtgcacaagcgcggcaacgacatcctccacgatccgtggtaca

SEQ ID NO: 2663 - DNA, 68 bp, Zea mays
  misc_feature: Incyte ID No: 700160960H1
tgtactgttgtttcgtttcgtcgtcgcttggtccgttcgtcctagtgctactttgggtttctgcgatt

SEQ ID NO: 2664 - DNA, 230 bp, Zea mays
  misc_feature: Incyte ID No: 700160962H1
  unsure 72: a, t, c, g, or other
gtttttttgttgacatttgcaacatctcttgttctttgtttttttactatagttgatgtatttttgacagcngttaattctattcaactaagtgaatattacctttcaggttatgcgtcctcagcatggtgtggaattctctatgaaagaggtgaattcaactagttggaatgttggtgaaacaccaaatattctagtaccaatcgctaatgggacagaggagatggaag

SEQ ID NO: 2665 - DNA, 232 bp, Zea mays
  misc_feature: Incyte ID No: 700160963H1
ctcaagtctcaggatttaactgcgttatttctagctgttagactgtactgcagctttgtcatggagtatgacatccatacaattctggacagtgctacacttgtagccacactgtttgttatttatatgatacggttcaaactgaggtcaacttatatggtggacaaggataactttgcattgtactatgtggtgctaccatgtgctggactggcactacttgttcatcctt

SEQ ID NO: 2666 - DNA, 234 bp, Zea mays
  misc_feature: Incyte ID No: 700160964H1
  unsure 105: a, t, c, g, or other
agtgtacgaacatgtcatcagagcactaagctcgttccaaggctgattcgtaaaaacaaaaagaagaaggaaaagtgttgttgcgtggagtgtaacatagctggntccccaactctcatctgctgaatgaaggtgagagagttgcggcctagccagtacaggtttgtaataattggtccagtcacaaacacgccaaaggaaacattccgaaactattgggatctgtgaactatt

SEQ ID NO: 2667 - DNA, 171 bp, Zea mays
  misc_feature: Incyte ID No: 700160965H1
  unsure 35, 51, 72, 74, 86, 107, 113, 116-117, 119-120, 128-129, 136, 144-145,156, 159, 167, 169: a, t, c, g, or other
agttcatcaagtcccacggcggcatcaccaccgantccgcgtacccgtacnacgcctccaacggcacctgcnanggcgcgcgggcncggcgcgggcgggtcgtggcnatcganggnnannaggctgtnnggccggnagcgaggnngcgctggccanggnggtggcgnanca

SEQ ID NO: 2668 - DNA, 226 bp, Zea mays
  misc_feature: Incyte ID No: 700160966H1
  unsure 155: a, t, c, g, or other
catgtactagctaattaattaagcaaccgagctctcctacccagttcagcgaattcaccgacgccgacgacgatgaccctgacggccttgggtcttggactagcactcctcgctgcggccagcccgtgcttggggttggggagcagcggcagcgncagcgcggcgcgtccgtgcctagcgtcgtcaccgaggcgttcttcgacggcatcaggtcccacgcacggga

SEQ ID NO: 2669 - DNA, 123 bp, Zea mays
  misc_feature: Incyte ID No: 700160968H1
cgtcatctctggcgtggttacgttctcatcagcgacttctaatggcgctcgctcgatctttatttcctgcagtcctttttgtaataagaagccaattgatgtgtgtgcacgcgcaatcctaat

SEQ ID NO: 2670 - DNA, 226 bp, Zea mays
  misc_feature: Incyte ID No: 700160969H1
  unsure 117: a, t, c, g, or other
ggaagaagtcagtaaagtaaattctgtcgctccaattcggacgaggagatgccgcggatccctctgatcaggttccccaagcggaatctcaaagccccatctccatccgcgccaggncgtcgcaacccgcagaccagcacgcgaccctcatgttccggttaggggctaaagcagaggcaccatcttctggagagattaaaaattaccgctttagatctgatgtgcc

SEQ ID NO: 2671 - DNA, 55 bp, Zea mays
  misc_feature: Incyte ID No: 700160971H1
  unsure 17: a, t, c, g, or other
gtgcggcgtgccgtcantccaaaccaccaaaagcaatgccgccgccgtccgcaaa

SEQ ID NO: 2672 - DNA, 226 bp, Zea mays
  misc_feature: Incyte ID No: 700160972H1
  unsure 41, 49, 154, 212: a, t, c, g, or other
gacccacacaagcgcaagcccgacatcggccgtgccaaggngctccttnggtgggagccaaagatccccctccgcgagggccttcccctcatggtcaccgacttccgcaagcgcatcttcggcgaccaagacaccgcggctgccaccaccgganaccagcaaggctaggacggaagaggagcacgggacctggaaatttttggtggcctgcntctagctgcttggt

SEQ ID NO: 2673 - DNA, 226 bp, Zea mays
  misc_feature: Incyte ID No: 700160974H1
  unsure 10, 129, 192: a, t, c, g, or other
cttgcaagangaatcgctgctgtaggaaccgcgtctcgaccactcttgcatcaggaatccggtgatccttatgcaaaggcttatgcaaaacttacgtcactttttgagcaaagaatggactcgtatgcnaatgctgatgccagagtttcacttgaacatattgcattaaaacaaggccataatgatgtcacnatacttacacctagtaccatcgccattgaggcat

SEQ ID NO: 2674 - DNA, 227 bp, Zea mays
  misc_feature: Incyte ID No: 700160976H1
  unsure 13, 112: a, t, c, g, or other
caccaagcccgcngcggcgtcgcccgctgctgcttactggggagatctcgcccgggggccgcagggtacgagccgcgttgccttcggaccagcgcccaggaacaaggggctncgcgcggccaacaactccgcaacgcccatagctaaggtagagagggttgatcgaagtgacatattgacattggatagcatcagacaagttttgattagactagaagacagcatca

SEQ ID NO: 2675 - DNA, 85 bp, Zea mays
  misc_feature: Incyte ID No: 700160977H1
  unsure 53, 64, 66: a, t, c, g, or other
gcagcgagagagatgaggccgtccatcgtgcttttcggggactccatcacggnggaggcgttcngngagggcggctggggcgcgt

SEQ ID NO: 2676 - DNA, 225 bp, Zea mays
  misc_feature: Incyte ID No: 700160978H1
  unsure 126, 147, 159, 182, 198, 209, 221: a, t, c, g, or other
gtcaccacagaatcaaagaaaagctttcccccgatcctctcgcggacaccagcgatgggttcccgctacgaggtggaggtcaccgtcggctccgcccgggacctcaagaacgtcaactggcgcaanggcgacctcaagccctacgcngtggtgtggatngactccggcagcaagtgctcganccgcgtcgacctcganaacggcgaganccggcgtgggangaga

SEQ ID NO: 2677 - DNA, 228 bp, Zea mays
  misc_feature: Incyte ID No: 700160979H1
ctttattaaataagtccatggacaatgttaaggtttcaattaatggtcatccaatctctgaaaaagcccttaagaaggcagagaagaaagctggtcctgttgacccaggtacatattggtacgactaccatgctggtttttggggtgtcatgggacgggaatgtattggcattgtccctccatttattagagaatttaattatccgatggccaaaaattgtgccggtg

SEQ ID NO: 2678 - DNA, 60 bp, Zea mays
  misc_feature: Incyte ID No: 700160980H1
  unsure 25: a, t, c, g, or other
caaagttcttttttttatgggtgtnacctaaaggttctgttactgttgggacttcaaagg

SEQ ID NO: 2679 - DNA, 223 bp, Zea mays
  misc_feature: Incyte ID No: 700160981H1
  unsure 29, 33, 36-37, 39: a, t, c, g, or other
ctagaatggttaaaccctagtagagaganaggnagnnangggggcggagaagcacgtacgtcgtacatcgcccaccgccctttgcctcgcctcgcctcgcctcgcctgcatatctaacagccggagccggagccggagccggcgccgacaatcgttccaactgatatggctacgacgccgccaggattcacgggcaacctgaagaaagcacttgcaggtctga

SEQ ID NO: 2680 - DNA, 104 bp, Zea mays
  misc_feature: Incyte ID No: 700160982H1
  unsure 28: a, t, c, g, or other
gctcgattcatcaaattagtttattggnggggagggagacgttaggtgggctgggcgtctcagcgcctgcgtgctccgcctcgggagaagccgagaaggtcaaa

SEQ ID NO: 2681 - DNA, 220 bp, Zea mays
  misc_feature: Incyte ID No: 700160985H1
  unsure 218: a, t, c, g, or other
tggggcgcaaggtcagagtgttcatgtacccgagcagcatctaaggttttgttggagtaaagatggactagaaatggccatgtgtttatttctcacttttctctgaacttaaaatgccttgtgttggtaacttagattgttcaagtgctgaacctgtggaagttgtgccaaaatttgttgtcgaacggatgaactattgtcgtaatgttatgccagcngc

SEQ ID NO: 2682 - DNA, 221 bp, Zea mays
  misc_feature: Incyte ID No: 700160986H1
gcaaggagcaggtccgcgtggacatcgacgaggtggcacccatggtgaagcagctgacggaaggccaaagcacatggactgatgtttctgcaaagtatcccgcccatgtcggcccccaaagtgagcaggagtgaagaatcgccgccctgatgtctagtctagccatcgaccgagaaggcgtcgggatgagccgtcttcattctccaattgccgagaagatt

SEQ ID NO: 2683 - DNA, 215 bp, Zea mays
  misc_feature: Incyte ID No: 700160987H1
  unsure 49: a, t, c, g, or other
tagtggatatcaagggtgataatccagatgctgttgttcctggtctaanggctgctggtgaagcagcctgtgcatctgttcatggtgcgaataggctaggcgcaaattcgcttcttgacatagttgtttttggcagagcttgtgcaaacagggtagcagatatttctaaaccaggtgagaagcagaaacctctggaaaaagatgctggagaaaag

SEQ ID NO: 2684 - DNA, 220 bp, Zea mays
  misc_feature: Incyte ID No: 700160988H1
ggcatacttgtacggacggaaagactaagaaccaaagatattacacaaaaggtgaaggcaaagaactactggcagggtggcgtttgccttgcctttgccgatgaagtcttatgttggttgtatgggactgtcaaagagaatgaagactatgttcttcaatttgtacatccatttaaccgcctcgaacttctgcgagcccagtccccctgtccggaagcca

SEQ ID NO: 2685 - DNA, 103 bp, Zea mays
  misc_feature: Incyte ID No: 700160989H1
  unsure 49, 64, 72, 94: a, t, c, g, or other
gaacaaacaagagttgcttcaaagctcattaaattttgtttaacgagtntcttgtttgacaganattgtgcnatttttattgttcatgtactangcatcaaat

SEQ ID NO: 2686 - DNA, 222 bp, Zea mays
  misc_feature: Incyte ID No: 700160991H1
  unsure 2, 69-90, 183: a, t, c, g, or other
cnacactacagccttctgcatcgcagtcctacaacaccagttccagccgctgccggaagagcgcgaatnnnnnnnnnnnnnnnnnnnnnngtttgcgatcgtgttacctcctaaataaaagttgtacacgcgaagtactactccagtatttacatgtatgtttctagcaggtgtacgtacgcnactcctgaataaattgtggtgcacgcaataaataaataa

SEQ ID NO: 2687 - DNA, 221 bp, Zea mays
  misc_feature: Incyte ID No: 700160992H1
  unsure 75, 91: a, t, c, g, or other
ggttccgacggcggtggcggcgccggagccggagccggggagaagaagagctcgcaggcgcccgcaaagcctggngcgtgcggcgccgcanagttcctcgcggggttgccgtcgcgcggcaacttctcttccggctccgccccctccaatctgggagggttcagggtttacgtctgcgagcacagcacagatcccccagaaggacaagttataaagacgga

SEQ ID NO: 2688 - DNA, 117 bp, Zea mays
  misc_feature: Incyte ID No: 700160995H1
  unsure 9: a, t, c, g, or other
ccaccctgngattatcatgtacccaaatgttggatggattgtatgtctgtcactgagccagaccttcttattgctatgaacgatgaatcaatcctctttctcgaggctaagacggct

SEQ ID NO: 2689 - DNA, 225 bp, Zea mays
  misc_feature: Incyte ID No: 700160996H1
cacatcatctgtctcaagaataccaatgatatgaaggacatgaagcctctcaatgaccgtgttctcatcaaggttgcagaagccgaagacaaaactcctgggggccttatcctcactgaaacaactaaagagaagccgtccataggaacggttgtagctgttggcccgggtcctctggacgaggaagggcaagagacagccatgtcagtgtcggcggggcagcac

SEQ ID NO: 2690 - DNA, 241 bp, Zea mays
  misc_feature: Incyte ID No: 700161001H1
aagaattgaggcctcgctggatccactcccacggatcataactcccacgcagatgattagcatgcaactggagttccatcagagaatattctttatcttggcggacctaatattgcttctgaaatttacaacaaagaatatgcaaatgcacgtatttgtggagctgacaaatggagaaagccccttgcaaagtttttgaggcagcctcattttattgtgtgggataacagtgatctcatca

SEQ ID NO: 2691 - DNA, 122 bp, Zea mays
  misc_feature: Incyte ID No: 700161002H1
tgttgaccgctctacttttgccttgttcatgcaaccagattggaatgagaagctgaagtttccaagcgaaatcccctatcaccaagagttgattccaccaaacggaacgctgactttcgggg

SEQ ID NO: 2692 - DNA, 123 bp, Zea mays
  misc_feature: Incyte ID No: 700161003H1
  unsure 115: a, t, c, g, or other
gaaagggcatatcgaggaggtttttagggtggtggtggtgttgtgaggagctgctgccgctgctctccagtctccaccgatggcgatcaagaacatgacggtggcggcgacgacncggtcact

SEQ ID NO: 2693 - DNA, 123 bp, Zea mays
  misc_feature: Incyte ID No: 700161005H1
ggactgtggtcacgacttccacaccgcatgcatcaaacaatggctggttataaaaaatgtgtgcccaatctgcaagaaaacagcactggacgcctaagacatggctgcattttccctccctag

SEQ ID NO: 2694 - DNA, 238 bp, Zea mays
  misc_feature: Incyte ID No: 700161006H1
  unsure 90, 188, 201, 222: a, t, c, g, or other
ctcgacctccaggtgacgatcgcgtcgcggaacccgaacgagcgggtgggcgtgtactacaagacgctggacgcgttcaccacgtaccgngacgaggcggtgacggtacccgtgtcgatgccggcgatctaccagggccacaaggacgtgtcggtgtggtcgccggtcatgtcgggcgacgcggtccncgtggcgcagtangtggcggacgccatgaagcangacatcgaggcgggta

SEQ ID NO: 2695 - DNA, 124 bp, Zea mays
  misc_feature: Incyte ID No: 700161008H1
  unsure 117: a, t, c, g, or other
gggaggacgacggcgacaccctcgcgcacctcgacctcggcttcaagttctacgacctcaccgacgacgtgcacggcgtgctgggccagacctaccgcccggactacgtcaacagcntcaacgt

SEQ ID NO: 2696 - DNA, 239 bp, Zea mays
  misc_feature: Incyte ID No: 700161009H1
  unsure 204: a, t, c, g, or other
aagcaatgaaagaaaatggtgaaccggctaaattcgattggatgaaaatatccgttcacatcttttgaagtgtcatagtgcaaccaacctaaggtatgtgcctggacttcatctgttgcttttatctgtaggggaagcctggaatcagatccagaggaggcgcttgcattcttgggcaagtactgcaaatgggccgtggtgacnttgcttcaaagggatgcatggcaaagcatggcaac

SEQ ID NO: 2697 - DNA, 124 bp, Zea mays
  misc_feature: Incyte ID No: 700161011H1
  unsure 56, 92, 99, 102, 108, 123: a, t, c, g, or other
ctagtgacggttgctctagatccgttcatcctggtggttttgtgaggtcgaaagcngcgagcgaattagaagatgctggacaagctgtgggncgacgtngtngccggncctcgcccggagacng

SEQ ID NO: 2698 - DNA, 102 bp, Zea mays
  misc_feature: Incyte ID No: 700161013H1
  unsure 93: a, t, c, g, or other
gataaaaatatctctgtataggcgttggaacacataccgacttaccgagtggtcacgtcgtctgtgaaaatcagattttgttccttgttttgnttaaaagct

SEQ ID NO: 2699 - DNA, 242 bp, Zea mays
  misc_feature: Incyte ID No: 700161014H1
ctcgacctccaggtgacgatcgcgtcgcggaacccgaacgagcgggtgggcgtgtactacaagacgctggacgcgttcaccacgtaccgcgacgaggcggtgacggtacccgtgtcgatgccggcgatctaccagggccacaaggacgtgtcggtgtggtcgccggtcatgtcgggcgacgcggtccccgtggcgcagtacgtggcggacgccatgaagcaggacatcgaggcgggctattt

SEQ ID NO: 2700 - DNA, 125 bp, Zea mays
  misc_feature: Incyte ID No: 700161016H1
gtgtgatttgatttcaaagctgtgcttgtaacgtaatgtaatacggtgtggcatatgcaccgggatatggtatgtgtattgggaagacgctatgcgtagcgtaagctagcagttgttgcattgca

SEQ ID NO: 2701 - DNA, 234 bp, Zea mays
  misc_feature: Incyte ID No: 700161017H1
acgaatattcattcctgccgtcaagtccttgttggtggaggtagggcctggcgccaggccagtccaaagaagaaagaagaggaaaaaggtcctgctgatgtaggtccattcccagaatctccccggctggctcggttcccgaacctccccgacatgtctccaaagaaggtttctgctacccataacgtgtacgtctcaccgctacggtcatcgaagatggacatctgctgtccc

SEQ ID NO: 2702 - DNA, 98 bp, Zea mays
  misc_feature: Incyte ID No: 700161018H1
  unsure 2, 4, 24, 82, 95: a, t, c, g, or other
gntnaatggcatggatggctagcnccacatcacagatagacaccgggagataggctgctgaacacagaagactgctaggtancttgtagagcacnagc

SEQ ID NO: 2703 - DNA, 97 bp, Zea mays
  misc_feature: Incyte ID No: 700161023H1
  unsure 2, 18, 28, 57, 72, 75, 82, 85: a, t, c, g, or other
gncgccggcggcgcagcntccgcaagcnggtgtactttgggttcggcgacggcggancgtggatggctcgtngangccgacnacncggcgccggcgc

SEQ ID NO: 2704 - DNA, 90 bp, Zea mays
  misc_feature: Incyte ID No: 700161024H1
  unsure 16, 29, 45, 52, 56-57, 62, 66-67: a, t, c, g, or other
ttcgtgtagccatcanccttctcatcgcnaccaatggccactgcngaggtcnagannccgancgtnngtggtggtccgaggaagcgcccg

SEQ ID NO: 2705 - DNA, 97 bp, Zea mays
  misc_feature: Incyte ID No: 700161026H1
  unsure 33, 70: a, t, c, g, or other
tgtaacagttcgccacggctaggctcctctccnctctcagctctcagctgcccctcctgcatgccgattngcctccaagctcgttctacttccagcg

SEQ ID NO: 2706 - DNA, 238 bp, Zea mays
  misc_feature: Incyte ID No: 700161027H1
  unsure 68, 75, 78, 114, 128-129, 136-137, 146, 167, 171, 195: a, t, c, g, or other
cgtgcttgcgctatggatcctctactttctgttccccttgatctcgctcccgctcctccacccgatcnagatcanaanccgcgcggacgccgtgcgcatgcagctgctcgggtncataatctgcctgnncgtgtcnngtgccgggntctacttcaagagccacaggngganggctgcccacatcatcgtcaacgncctggtccagagcaccgccaatggcatactgtacgcgttcggc

SEQ ID NO: 2707 - DNA, 195 bp, Zea mays
  misc_feature: Incyte ID No: 700161028H1
ctagcttttcacgtacacagttgcagttcagagagaagagaaagagaccgagatctcgccgatagctagcatcatggcgtccaaggcgctcctcgtggtagcgctcctgctcgccgccaccttcctcgccgcctccgctaacgagcaagccaaggcggccaaagaggagaataaggcggaggtccaagactggca

SEQ ID NO: 2708 - DNA, 97 bp, Zea mays
  misc_feature: Incyte ID No: 700161029H1
tgtccgcctacttgtggaaggtcctcgccgccgtcgtggccgcgtgccgcgtgcccgaggagcggtgctgcatgggctggatggtggacgctcggcg

SEQ ID NO: 2709 - DNA, 239 bp, Zea mays
  misc_feature: Incyte ID No: 700161030H1
cgaggttttttctgaacaagaacaatcactacgcagctccattccaaacccacctgcaaatttcagattgagggaggatcagctgactggaagttctcttaaagcgccgcgttctttcttctccctgtcaacattccgaagcaagggaggtgatgccaggctcaggtgatcctcagaagacaccagaggtgtggtgtgtataaaatatcttgtcaagttaggtatggttatcaaatttc

SEQ ID NO: 2710 - DNA, 89 bp, Zea mays
  misc_feature: Incyte ID No: 700161034H1
gacagcagatgattactttgagaagtaccctgaactcaggaagaagtttgacgatgaaatccgtaacgataactggggatattgaagag

SEQ ID NO: 2711 - DNA, 90 bp, Zea mays
  misc_feature: Incyte ID No: 700161035H1
gacatacttcgatagttggaccaggatttcaattgaaggagtttttggtggccttatgtcattcgtggctgttctggacatttgcttatg

SEQ ID NO: 2712 - DNA, 93 bp, Zea mays
  misc_feature: Incyte ID No: 700161036H1
  unsure 45, 48, 50, 54, 62, 74, 76, 78-79, 83: a, t, c, g, or other
gtaccttggcggattgttgcgcccttccgttcggttccttcctcngcncncgcnaccacgcntcgcggttcgcnangnncgcnccaagccttt

SEQ ID NO: 2713 - DNA, 58 bp, Zea mays
  misc_feature: Incyte ID No: 700161037H1
cagaatgttcatcctttcacgattggatatatgaaaatgtgctcagttgtttggtttc

SEQ ID NO: 2714 - DNA, 231 bp, Zea mays
  misc_feature: Incyte ID No: 700161038H1
  unsure 201: a, t, c, g, or other
gtgatgcttgttggtgcctatccctttgaggaccccgacgaaccgaagaatttccgcaagacgcttactcggattatcagcgtccagtacgcggttcctgattttgtccgagtttcaatggagtgcaggcatctgctgtctcggatctttgtggcgaaacctgagcaacggataaccatccccagagatcaagaaccaccnatggttcttgaagaacttgcccatcgaaag

SEQ ID NO: 2715 - DNA, 221 bp, Zea mays
  misc_feature: Incyte ID No: 700161040H1
  unsure 63: a, t, c, g, or other
ccgagaccaaggaaggaacccgtgctggaacgaggtgttcaagttccagatcaactcggccgncgccaacgtgcagcacaagctcatcctacggatcatggaccacgacaacttctccagcgacgacttcctcggcgaggcgacgatcgacgtgacggacatcgtcagcctgggcgccgagcgcggcacgtaccacctcaacgcggccaagcacaacgtgg

SEQ ID NO: 2716 - DNA, 231 bp, Zea mays
  misc_feature: Incyte ID No: 700161041H1
  unsure 49: a, t, c, g, or other
gaaccacctcggggcttcaaagtatcctatggtccctgggcacgaggtngtcggcgaggtggtggaggtcgggcccgaggtggccaagtacggcgtcggcgacgtggtaggcgtcggggtgatcgttgggtgctgccgcgagtgcagcccctgcaaggccaacgttgagcagtactgcaacaagaagatctggtcatacaacgacgtctacactgatggacggcccacgca

SEQ ID NO: 2717 - DNA, 91 bp, Zea mays
  misc_feature: Incyte ID No: 700161042H1
cgcagggtgacggggagagcccatcatggcgccgcagcagccgtgaagcacaagagcttttctgcagcacgacggctttgtcctctctcct

SEQ ID NO: 2718 - DNA, 91 bp, Zea mays
  misc_feature: Incyte ID No: 700161044H1
catggaagctggacatgcagttcctggcattttggttttgcccatgttttaatctgctgaattagtaaatcctggagaattcaaaagcgtt

SEQ ID NO: 2719 - DNA, 182 bp, Zea mays
  misc_feature: Incyte ID No: 700161045H1
  unsure 135, 156, 159, 176: a, t, c, g, or other
agcacagctagcgcctgctcccattcgcctgtgatcatgtcttgcagcagcggcaagtgcgactgtggctccagctgctcctgcggcagctcatgcaactgcatgtcccctaacgtggagaccgccgccgccagnagcatcaagaccacggtcctngcngcgccgaccaccaaggncagcgg

SEQ ID NO: 2720 - DNA, 232 bp, Zea mays
  misc_feature: Incyte ID No: 700161046H1
  unsure 229: a, t, c, g, or other
agaagagaagaatggaagtggaaagacatggcttggcactagggatgagagttcacgggtggacttgatagctcatcagcatggtgtggtatggttattctccctgccattgctatgctattaacagagcaatgccaaggaagaagattcagaagagaccagaaatcaaacctgctgaaccatccaagtccaatcttgttctaaaatctgatgtatcaaagggtgtagnccg

SEQ ID NO: 2721 - DNA, 154 bp, Zea mays
  misc_feature: Incyte ID No: 700161049H1
  unsure 123, 135, 139, 143-144, 146, 148-150: a, t, c, g, or other
cccttattcacttccgaggtgaatggccaaggattcactacgaagcctttacaaagattccccggggctgtagccacccgttagtttcctaaatgtaccgcactcctccccaagggacaattnacctttggaagngggnccgnnancnnncccc

SEQ ID NO: 2722 - DNA, 156 bp, Zea mays
  misc_feature: Incyte ID No: 700161050H1
  unsure 57, 112, 151, 155: a, t, c, g, or other
gtcaggtggagatgatgacatccttgatgatctcgacgagatgatatttggcaagangggaggtagcagctcccaggaaggtccgaaaaagccagatccgaagaaggatgancctgatcagcttttaattactttccataattcgaagccngtant

SEQ ID NO: 2723 - DNA, 153 bp, Zea mays
  misc_feature: Incyte ID No: 700161051H1
  unsure 70-92, 151: a, t, c, g, or other
ctacgttctactcccactcgcggtcgcggtagccggcggcggcggaggaggaaagcaggcaggccatggnnnnnnnnnnnnnnnnnnnnnnngccgtccgcgagatgcagaaggatctcgaggtccaggccaacgcctcagcaagatccanaa

SEQ ID NO: 2724 - DNA, 243 bp, Zea mays
  misc_feature: Incyte ID No: 700161052H1
aagtactggactgacattcaagggctcatgggcattgcaactattcttgaccctcgattcaaaactgcagtcctattgatatgttatgaggacttacttgttgtgtccggtagtgaatgtgaagatagagttgctaatgtgaagaacttgctagctgatttgatgaatgagtaccatataactgagaatattgagaacaatgagtcatcaacaccatcagttggaaacagtgatgacttcttt

SEQ ID NO: 2725 - DNA, 141 bp, Zea mays
  misc_feature: Incyte ID No: 700161053H1
attgggtaccatgttcccggatgatgagttggaataaagcaaaacttgtgttccagtcgatctacgcttctcatcattcatcatcaacaatggacaacaaaagctacagggtttagaacgttaacggacttgttttcgagc

SEQ ID NO: 2726 - DNA, 210 bp, Zea mays
  misc_feature: Incyte ID No: 700161054H1
  unsure 125, 148, 172, 175, 198: a, t, c, g, or other
agcacagctagcgcctgctccccttcgcctgtgatcatgtcttgcagcagcggcaagtgcgactgtggctccagctgctcctgcggcagtcatgcaactgcatgtcccctaacgtggagaccgcngccgccagcagcatcaagaccanggtcttcgcgggcggaccaacaanggnaaggccgggggttttaggggcanaaaagggggggg

SEQ ID NO: 2727 - DNA, 239 bp, Zea mays
  misc_feature: Incyte ID No: 700161055H1
  unsure 184, 205-206, 221, 223, 228, 230, 232, 234, 238: a, t, c, g, or other
catggtcgcgctctctggtgctcacaccatcgggcaggcacgctgcaccaacttcagagcccacatctacaacgacaccgacatcgacgctgccttcgcgagaacgaggcagtcaggctgcccaagcacctcaggcgccggcggcgacaacaacctggcgccattggacctccagacccctacngtcttcgagaacaattattannggaacttctcccaangnggggntntncncccna

SEQ ID NO: 2728 - DNA, 236 bp, Zea mays
  misc_feature: Incyte ID No: 700161056H1
  unsure 193, 220, 229, 234: a, t, c, g, or other
tccgaaaggatcttagcggatttcggtgaggcggcggcggaccccgacgccgtggccgagctcccaccccttctccgggcgcgcgctttccttgccttggcgcaggccgcgacctcccttctcggagttcgtttaaggtgttcgggagttgaccctgacgagcaccccatcagaaaggagtttgaaagttaanctaatgcaggagagttaaatcaattgngaatggganaaacncc

SEQ ID NO: 2729 - DNA, 244 bp, Zea mays
  misc_feature: Incyte ID No: 700161058H1
tttaggaaagagatgaaggatcttatctatcagatagaggccaatgtcgagttcattaagtcaaaacgagtggggattgcattttcacccaatgacccagctgtagagtcatttctgcagaccgaaaaggaagaacgttgcagccctctctcaaaatttgtttcgaagttcattccagaagttattggtaaggagattgagaagtctacctccagcatcttcccacttcaaaacgtcttcatcc

SEQ ID NO: 2730 - DNA, 81 bp, Zea mays
  misc_feature: Incyte ID No: 700161060H1
cctaaaacgaagaagccaccatcaagaacttgcaactgctggcccaagtggtgcctctcttgctgctgcagcaggaacaag

SEQ ID NO: 2731 - DNA, 89 bp, Zea mays
  misc_feature: Incyte ID No: 700161064H1
  unsure 35, 38, 45, 57, 68-69, 71, 76, 79: a, t, c, g, or other
agcacagctagcgcctgctccccttcgcctgtgancangtcttgnagcagcgggaantgcgatgtggnncnagtgntcnggcgaaagaa

SEQ ID NO: 2732 - DNA, 237 bp, Zea mays
  misc_feature: Incyte ID No: 700161067H1
  unsure 12, 53-54, 154, 156, 166, 173, 175, 180, 182, 187, 191, 201, 204, 214,216, 218, 230-232, 236: a, t, c, g, or other
ggagagagagangcgaggaaggagggagagagcacgggggcttgatcgaaganngatgccggagcaaaggtggtgaagaaggccgcggcggggcgtcgcggcgggggcggccccaagaagaagccggtctctcgctccgtgaaggccggcctcnanttccccgtangcccgtntnggcgntnacttnaagnagggtctttntcnaagtttttcncnangggccccttttnnntttnt

SEQ ID NO: 2733 - DNA, 234 bp, Zea mays
  misc_feature: Incyte ID No: 700161068H1
  unsure 197, 212-213, 217, 219, 221, 231: a, t, c, g, or other
cattggtcgaagctgctaaagaggaagccagctccataagtaacattattgctcaggctacaaaatgaagttcttcatgcctgccccccttccctctatcttgttattgttgtacaagcaactgtaatgcactggactgcgagttcatttgctctgctcatgtttatggatttcaagactccaggttattaagaagncgtgatgggaaacannttgnangntccccggtgnaaa

SEQ ID NO: 2734 - DNA, 107 bp, Zea mays
  misc_feature: Incyte ID No: 700161069H1
atgaaatactgggtttgttatgaccaacacggatgctcggtttgtttgttttgaaatactgggtttgagattcattgtaatggtgtatgctcagtttgtttgttttg

SEQ ID NO: 2735 - DNA, 86 bp, Zea mays
  misc_feature: Incyte ID No: 700161071H1
  unsure 31, 62: a, t, c, g, or other
gccaagaattgcaggactatgtatgcatgtnaaacttgcaagattatcaatttttatgagcnataaaattaatatctgtgggcacc

SEQ ID NO: 2736 - DNA, 212 bp, Zea mays
  misc_feature: Incyte ID No: 700161072H1
ggatctgttctataggatcgtaccgttgcatccttgattaataaggaggcaagcactttagcctggttgatgagtcatgacctgtgggccagagcgtgattaacggccaggagttcagctgtactgcttgctctggttgctgtagaggatcgttccttgatcaggcttgcctggtttgggatggccaaaagttgtctaaaaggccccctttt

SEQ ID NO: 2737 - DNA, 246 bp, Zea mays
  misc_feature: Incyte ID No: 700161078H1
ggaaaaaatctctattttcgagaggcaaattctcagtatcatgagttcacaaagaaggaagcctgtgcaggcacctggacagcaaacgtttcagcaatctggtgggcaagctcctagctctaatatgtcacagcagcatcagacttcccaaggtttgcagcagcatgatagtcatactaatcagatgcctcaagcaagtttaccaagtatgaacacaggagtaccgacctctggagcacctggcat

SEQ ID NO: 2738 - DNA, 137 bp, Zea mays
  misc_feature: Incyte ID No: 700161079H1
  unsure 95, 100-101, 108, 129, 131, 136: a, t, c, g, or other
atgacagccagactcggctgtggaagttcgagggcgaggcgcgggagcaggcgaagaaggacctggtggaggtcctggagaccctggaggggganctcgnngaaaaanctttttttggagggggccccntngtttng

SEQ ID NO: 2739 - DNA, 156 bp, Zea mays
  misc_feature: Incyte ID No: 700161080H1
  unsure 31, 34, 36, 55, 63, 82, 87, 89, 99, 103, 108, 126, 131, 134, 139, 152: a, t, c, g, or other
ctgatgaaggcatgttcacatttcatcagangtncngcaccaaagcgctctgcanatgcgatnaagtaacccaagttgtcantgtcnancccagcagcnacanagcgntttggtgctgcacgtctnatganggnatgtncacatttcatcgngctg

SEQ ID NO: 2740 - DNA, 141 bp, Zea mays
  misc_feature: Incyte ID No: 700161084H1
tcttgcaagtatgaaggaaagtgagatggattttactgcaagctttgagctgatgctcagtgaaagtagtgccactgtgtcaggagtgacctggtgctatggcattgtcttgtggtttgacacggggtttaccgacagatt

SEQ ID NO: 2741 - DNA, 230 bp, Zea mays
  misc_feature: Incyte ID No: 700161086H1
  unsure 175, 184, 202-203, 207, 214-215, 220-221, 227: a, t, c, g, or other
gtaggactgttggtggaattcatagacctaagcctgaagataataagtatactgaagaggaacttcttctgttgaaaaataaagatatgggatatatccttcagagcgttcaaagtgaaaaaaagaaaatcgaaaagctaagctcaacactccctgaacttgataacaagcctcnaaaccagcntggtttttttggcggaanncggnaaggggnnaaagnnttcctncgg

SEQ ID NO: 2742 - DNA, 230 bp, Zea mays
  misc_feature: Incyte ID No: 700161087H1
  unsure 198, 206, 213, 222, 229: a, t, c, g, or other
cagatgaaggcgttcctggacgccacaggcggtctgtggcagggccaggcgctggcggggaagcccgcgggcgtgttcctctgcacaggcacgcagggcggagggcaggagaccaccgcactcaccgccgtcacgcagctcgcgcaccacggcatgctcttcgtgcccgtgggttacaccttcggcgccggcatgttnggaatcantaaggtnaggggtggnacccttnt

SEQ ID NO: 2743 - DNA, 231 bp, Zea mays
  misc_feature: Incyte ID No: 700161088H1
  unsure 91-115: a, t, c, g, or other
gcaccgggcccctaaaaagtcaggaacgaccctgctgagcagggcaggccacgttactaatttgtactagaaattaagccatggacgaggnnnnnnnnnnnnnnnnnnnnnnnnntgcaacctgcactgtgcattccgtcggttcacgtgttcagcagttggttgttacacttgtagcgctcgcagtgccagatgtggagaaatgaaatgaaatgaaaagagagagagaga

SEQ ID NO: 2744 - DNA, 233 bp, Zea mays
  misc_feature: Incyte ID No: 700161090H1
  unsure 161, 230: a, t, c, g, or other
tcctgtatgactcatggttttctagagaaaaatattggatcgttacaataatgctaatatggtgttaatctaggattgctcattttgagtattcctgtatgactcatggttttctagagaaaagatcttggactgttgcactatctccacttgtaagatcnagacttatgtagttatctgccatagcaacactgaaagtgacaatgtttgaatggtatagttcttttccntgg

SEQ ID NO: 2745 - DNA, 235 bp, Zea mays
  misc_feature: Incyte ID No: 700161092H1
  unsure 230, 232: a, t, c, g, or other
caaggggacaacaaaaaaaaaaaacagggctcaacagtgtgtcgctggctgccaccgaaggctcactctgctttgcaagtgcaggaccagactgaagggcttcagatcgagaggggcaatgtacactcaagtgtacatgcgttatggtagacacaaggggtgtgtttttttttgggatgtttttggattaggaattggattattgtaaggggaatttttcttttttttcnanttg

SEQ ID NO: 2746 - DNA, 233 bp, Zea mays
  misc_feature: Incyte ID No: 700161101H1
  unsure 113, 149, 201, 211, 221, 231: a, t, c, g, or other
acgcggtgcggggctctcgctctcgcgcccccgctcgcgcttccgcagatccgccttcgactcggggctagagacgcgtggggagaagggggagccgtggacggaggtgctgncgtgggagccccgcgcgttcgtgtaccacaacttantctccaaggaagaatgtgaccatttgatttcactggcaaagcctcatatgangaagtcaacngtagttgatncagaactggngg

SEQ ID NO: 2747 - DNA, 234 bp, Zea mays
  misc_feature: Incyte ID No: 700161102H1
gggctttcttcatccctccacggattcaatgatggaagctcatcatattcaaccccgaagcagtcaaggtcaaggaggccaaaccattctggcgagcaacttcctttcaaccccgcaacgagtggcaatggtttttgatgccaccctacacgatggccacccagattggttatggaaccaaccattgcagcaagcacaccttactctgctccaagtttgttggcacccgtagat

SEQ ID NO: 2748 - DNA, 233 bp, Zea mays
  misc_feature: Incyte ID No: 700161103H1
ggagtgcatgccctcctcctctcctcttggttcttgcagacaactcgcacctgcaggttgttcctttgtgtccaaaccaagtaaaggcggcaggctcctcacattctcctgccatatctgctgcccgctgctccccccctctctcttcaagctagccagtagctggctgaatggtcctcgcgcgagccatggtgatggagcacaggaagaagtcgaattatcttgttgccctc

SEQ ID NO: 2749 - DNA, 168 bp, Zea mays
  misc_feature: Incyte ID No: 700161110H1
gagggcatcagtctggttgttatcctagagtgtttttgaaacagcagaagattctgcttcatggctgccggtcttttttttaatgtgggtgagaattaagcactgtgttgtaccaataaacactgaaacagtacttgatactgaactgaatcgcgtgctagttgtatt

SEQ ID NO: 2750 - DNA, 232 bp, Zea mays
  misc_feature: Incyte ID No: 700161112H1
acgagggcaatgttgaggccactggtgaggacttctctgttgagccagctgatgagaggaggcctttccgtgctctcttggatgttggccttatcaggactacaacagggaaccgtgtctttggtgccctcaagggagcattggatggaggcctggatattcctcacagcgagaagaggtttgctggattcaagaaggacgacaagcagttggatgctgatacccaccgcag

SEQ ID NO: 2751 - DNA, 202 bp, Zea mays
  misc_feature: Incyte ID No: 700161113H1
gctggtttgtcgtttgcaatatccaagcctccaaggccatgattttattagacctacttgaaatggcggtaggtgatgtactgatgtggattttgtacgaggaatagtggaataaggtattctggtgggtttgttgttggtcacaagatgccagtccggcctctcctagcataccatactagtagtaattttcttcttggag

SEQ ID NO: 2752 - DNA, 234 bp, Zea mays
  misc_feature: Incyte ID No: 700161114H1
agcgacggcgtgatcacagccggtggggcgagctcaaggcagcggctgcaagggcggcttcgaccctgtctacaggggcgccgccacggagggcgccaagcctggactcaagccataggaggtcgtgaggtcgccgaggctcagggctgcacaacagatctcttgtttctcccttctttgattctcccttgtttctaaggtttcgattcttccttctcttgttctccccagcag

SEQ ID NO: 2753 - DNA, 237 bp, Zea mays
  misc_feature: Incyte ID No: 700161116H1
  unsure 5, 132, 180, 193, 226, 232: a, t, c, g, or other
gcganggagaggcatggctgctccgaagctcgcgacgctggcgctggccgtgctcctggcggcgaccgtggtggctcccccggccgcggtgcgcgcggcgatgtcgtgctccaccgtgtacagcacgctgangccgtgcctgccgttcgtccagatgggcggggccatgccgccccagcngtgctgcggcggnatccgcagcctgctgcagcaggccaacaacacncccgancgccg

SEQ ID NO: 2754 - DNA, 215 bp, Zea mays
  misc_feature: Incyte ID No: 700161119H1
gttcgttcgcttcttttggaaaagggaatcaaaccaaaaggcaaagattttacgaaaagttgattacccactggaattggatgtttatgaattttgctctgatgaactgaaacagaaactccaagcacctcggcagatgctgagagatgcagaaaatgcaaagtttggattgaaagcacaagggaaagctagtggctttaaagaaaatgagggat

SEQ ID NO: 2755 - DNA, 226 bp, Zea mays
  misc_feature: Incyte ID No: 700161125H1
gcctgttcttaattattgccaggacaggagaaacaaagatgaggcctcagctgatactcgtcggcactctggctgttctcgccatcctcgcagctctcggcgaaggctcgtcgtcctggccctgctgcaacaactgcggtgcttgcaacaagaagcagccgccggagtgccagtgcaatgacgtgtcggtcaacgggtgccatccggagtgcatgaactgcgtcaa

SEQ ID NO: 2756 - DNA, 225 bp, Zea mays
  misc_feature: Incyte ID No: 700161126H1
cgggaattcttcctgcaggccttttgacattttacggcctggtggagcccctagaccgaagatggcatgtcttgggtcttgggtatgatgtagacatagatgaccgtttgattgagagtgctgctgttgtgcactataacggaaacatgaaaccgtggctgaagctggctattcgccgttacaagtatatatgggagcggtatgtgaatatctcacatccgtatg

SEQ ID NO: 2757 - DNA, 227 bp, Zea mays
  misc_feature: Incyte ID No: 700161128H1
tctctctgaagaagtgcttggaaagatgggcgcgccccctaagcccgacgtgccagtcatcacaccgcaggaacttgcagaggctgacggtatcctctttgggtttccgacacggttcggaatgatggcagctcagatgaaggcgttcttcgatgccaccggtgggctctggagggagcagagcctcgctggcaagcctgccggcatgttcttcagcactggaaccc

SEQ ID NO: 2758 - DNA, 229 bp, Zea mays
  misc_feature: Incyte ID No: 700161130H1
acacgatcggcatctcccaatgcaactccttcagcgagcgcctgtacaacttcacggggcgcggcgggcccgacgacgcggacccgtcgctggacccgctgtacgccgcgaagttgcggctcaagtgcaagacgctgacggacaacacgacgatcgtggagatggaccccggcagcttccgcaccttcgacctgagctactaccgcggcgtgctcaagcggcggggcct

SEQ ID NO: 2759 - DNA, 172 bp, Zea mays
  misc_feature: Incyte ID No: 700161131H1
tacacaatccacgtctcagtatttttgttcttatggtctcggtattgaatgcctaggtgagttttttttagctgtgcacaaaaaaacagttaaactcgatggtatctcaactgctggagaaatgctagtgccctatttttggctgtggaattggaaatttggaatgcatcca

SEQ ID NO: 2760 - DNA, 105 bp, Zea mays
  misc_feature: Incyte ID No: 700161133H1
  unsure 2, 11, 14, 23, 79, 88-89: a, t, c, g, or other
anccgctcgcnggngtcggcgcngacgtcaagcactgccaggccaagggcatcctcgtgctcctctccatcggcgggcngcccaacannaacaccgtcgccggcg

SEQ ID NO: 2761 - DNA, 222 bp, Zea mays
  misc_feature: Incyte ID No: 700161134H1
caacaaggcagcagcacaagcaagaaccacacctcctcccttcgcctgtgatcatgtcgtcttgctgcggcggcaagtgcgggtgcggctccagctgctcctgcggcagcggatgcaacggctgcggtatgtaccctgacgtggagaccgccgccaccagcagcgtcaagaccacggtcctcgccgcgccgaccaccaaggccagcgccggcggcttcgagg

SEQ ID NO: 2762 - DNA, 104 bp, Zea mays
  misc_feature: Incyte ID No: 700161137H1
ggttaaggttggagggatgcgggttaagattggatggatgctcctgggctaagtggatttaatttttatccttggtgaataatgaacacggaggtgtagccaaa

SEQ ID NO: 2763 - DNA, 222 bp, Zea mays
  misc_feature: Incyte ID No: 700161138H1
  unsure 34, 76, 145: a, t, c, g, or other
gaggccgtgggcgtcgactacgtggacgagagcnaggtgctgacccccgccgacgacgcgcaccacatcaacaagncacaacttccgcgtccccttcgtctgcggctgccgcgacctcggcgaggcgctccgcagggtgcgcganggcgccgccatgatccgcaccaagggggaggccggcacgggcaacgtcgtcgaggccgtgcgccacgtgcgctccgt

SEQ ID NO: 2764 - DNA, 221 bp, Zea mays
  misc_feature: Incyte ID No: 700161139H1
  unsure 31, 54: a, t, c, g, or other
agccttcgcattcctgtccggcggaaccgcngaaggaagggagccgaacgagcnagcaagccaccaaggaaggttgctagggccggggcggatggggttcatactgcgggtgaggctcgcctacttcttcgccggcgcggctgccgccgccacgggcgggggctacttcctctacaaggactacaagctcgccaacgattctatggccctcaaggtgaaat

SEQ ID NO: 2765 - DNA, 222 bp, Zea mays
  misc_feature: Incyte ID No: 700161140H1
  unsure 31, 39, 43, 47, 54, 77: a, t, c, g, or other
ggaccgaccagagtaccggacacgcagcganggggaggnaganggangcaaganggaggaccgagcaggcctaggcnctagggtagtcccgtccggtcccctgcggtgcaagtccggccggcgggcgggctgactgcctggcgtcggtagggggcgacggcgatctatatctgtcgatgggctactggtgggaccgcgtcgtgctgccggtgcggcgggcct

SEQ ID NO: 2766 - DNA, 90 bp, Zea mays
  misc_feature: Incyte ID No: 700161141H1
cctgtacgtactttggtatcgcgacatctcagtgtgcatcttcaaggatcataagttgaatgttatcattaaggtcagtttggttcagat

SEQ ID NO: 2767 - DNA, 223 bp, Zea mays
  misc_feature: Incyte ID No: 700161143H1
gcggcctgctatttggattgtcctgtacacataggagtcctatgtggatacaccttaaagcttcatttggtaaacaactcttgacaagggatgagtccactaaattcattgcctttccttcattccataagctccatgcctgaaccaatggaatcaatttcatagaacattaataagtacctttttgctgcattgcaaaaaaaaaaaaatgccaccattctta

SEQ ID NO: 2768 - DNA, 223 bp, Zea mays
  misc_feature: Incyte ID No: 700161144H1
  unsure 214: a, t, c, g, or other
gcaccccacccgacccacaccctgcacgcagcagcaacgagtctccctgggaggagcgagcgagagagcggtatggccggtggcagcatggtgttcgagccccacgcgggcacggtggcgggcggcgacgtcgtgttctgcgcggccatcgtgtgcctgtcgctcctgtccatgatcatcttcgcggcttccggctcctctggcgctggggacngggaggaaa

SEQ ID NO: 2769 - DNA, 243 bp, Zea mays
  misc_feature: Incyte ID No: 700161149H1
  unsure 31: a, t, c, g, or other
aggagagctactcaaagaagagaatgaacangaggaggaagtatttgatcaggtcagtgagtgcctagggactttgattaaaaccttcaaaggttctttcttgccgttttttgaagagctctctatgtacattacaccaatgttgggaaaagataaaacacctgaagagagaaggatagctatctgtatttttgatgatgttgcagagcaatgccgtgaatcagctctgaagtattatgacac

SEQ ID NO: 2770 - DNA, 222 bp, Zea mays
  misc_feature: Incyte ID No: 700161150H1
  unsure 145, 205, 217: a, t, c, g, or other
ttccagagcctcgccaccatgagcgtgctgcagcctgacgctcgcggtatctacagttccttaccatacgtttcgccgctgcctccgttccagtacgcggcgtacctgcactcttcgctctccctcccaccgctgaatcctcgcngccacccgcctctcctcccgctcccgccggcagctgctgctaaagggatgaagcaggcgncgcagaggaggnggtgc

SEQ ID NO: 2771 - DNA, 242 bp, Zea mays
  misc_feature: Incyte ID No: 700161152H1
  unsure 143: a, t, c, g, or other
gtggacgccagagtgactgtggagtacgaccaccgaggcgtcggtgggggctacgtgagccgcatgccgccgccggcagtcatgagctacaaccaggtgcgcccgagcgtgaggcgtcctactacgcccccgccccggctacngcgccggcgccgatgccgatggggaggcccgggccgtcgcagggctacatcgacgagcactacacgccgtcttacagcagcagtagcaacaactactac

SEQ ID NO: 2772 - DNA, 142 bp, Zea mays
  misc_feature: Incyte ID No: 700161154H1
  unsure 5, 95: a, t, c, g, or other
cgganaggcctggaaaagatcgagaacctacagagccacgataacaatgaaatctatgaaaaggctgtgaagcttcttgagacatactggatggnggaggaagatgacgcaatggctactgccggggaagctgctcctgctt

SEQ ID NO: 2773 - DNA, 240 bp, Zea mays
  misc_feature: Incyte ID No: 700161155H1
  unsure 131, 151, 186, 207, 232-233: a, t, c, g, or other
accaccgtcatgcaccgctacgtcggctgctgcgacaagctcaacgcctcctcctccggcgacgccgaacgcgctccgcttccgcccgcaccagatgaacgccgcgctcgagctcctcgagaaccaccgcntcgacgccattgtctacttngccgacgaggagggcgtctactccctcgactcttnaaagtttgcgccaagtcaggnggttcggcaatggcctgtgcaatgnnttgagga

SEQ ID NO: 2774 - DNA, 79 bp, Zea mays
  misc_feature: Incyte ID No: 700161156H1
cttgtaacgagaccttgaattgttcggaaatgagcattcctgtgctcttctttaaaataaactttgccttaggttcctc

SEQ ID NO: 2775 - DNA, 125 bp, Zea mays
  misc_feature: Incyte ID No: 700161157H1
gtccacgttgtacccatggctcctgctagtgctagctcgtccacaataaatgctcggcgtcgcaccctcgcgaaaagtaaaccaagagtttactgactagtacgagctagctagcatgcagtaat

SEQ ID NO: 2776 - DNA, 241 bp, Zea mays
  misc_feature: Incyte ID No: 700161159H1
  unsure 86-108: a, t, c, g, or other
atcatcgatcgccgagcgtgcgtgctctagctctagcaatagcagcgaggagacggtcgaggatggatcagaacaacagcaacagnnnnnnnnnnnnnnnnnnnnnnncaccacccgcgggtcagatcgatcgatcgatcgtcatctccgaataaatccgtgtggatggacggatcgacggacacatattgctgacatggcttgcttgcaggctacccgacggcaggcgcggacagcaggg

SEQ ID NO: 2777 - DNA, 223 bp, Zea mays
  misc_feature: Incyte ID No: 700161164H1
ctactatacgtctacactacatgcaataatgcaccacatgtacgcgtacgcgcgccgagctgtgtggacgccgcagctagcatgcacggccatcgttcctatacgtcgtcgtctgtcgttcgagtactcatgagctgtgtcgtcgacgtccacccatgcatccggccgccacgctttgatgatggtcatgacatcttgacaataaacacgtgcatgcagtatt

SEQ ID NO: 2778 - DNA, 211 bp, Zea mays
  misc_feature: Incyte ID No: 700161166H1
  unsure 6, 33, 42, 133, 140, 142, 151-152, 156, 158, 188, 190, 194, 200, 203,206-207, 210: a, t, c, g, or other
gtccangttgtacccatggctcctgctagtgcnagctcgtcnacaataaatgctcggcgtcgcaccctcgcgaaaagtaaaccaagagtttactgactagtacgagctagctagcatgcagtaataataatcntcgtaanantaataatannacgncngggctgagccactttgttcgaccaaaaaanangaanagaacnagnacnnggng

SEQ ID NO: 2779 - DNA, 234 bp, Zea mays
  misc_feature: Incyte ID No: 700161167H1
  unsure 144, 190, 230: a, t, c, g, or other
ctgcagcaaaaccatcagatctagcagaactctctcgacctcatcggcgttggcggacgcgtgttgaccggagatggcgccgagcgggtggaggaggagcgcggcggcgcgggtcgcctggcgcccggccacggtttgcctgtngctcgcgctcgccgccgccgcactgacgctcgcccaggctaagaangacctgacggaggttacccacaaggtctacttcgacatcnagat

SEQ ID NO: 2780 - DNA, 224 bp, Zea mays
  misc_feature: Incyte ID No: 700161168H1
agaattaagagataactgccagacaatcacctctcctgttgtcctaaaaacaaagtctggaagtattgaatcaaaaaatccgaaagtttttgattcatgggagtggattgaacgagaatatgtgcttgttccggaaaactgtacttctatggaaatgtcttcactcaacatcaagtccacaaaggatgatatggatacaagaacggtcagctatggtaggtcca

SEQ ID NO: 2781 - DNA, 123 bp, Zea mays
  misc_feature: Incyte ID No: 700161170H1
gccataccctccaaccgctggatcgggtatcggcattactgggcgcacgagactagggatttcccccttgcaatcacgaatccatggcggatgctgaacctgttgatcagaagaattaccttg

SEQ ID NO: 2782 - DNA, 124 bp, Zea mays
  misc_feature: Incyte ID No: 700161171H1
gaaggagagaaccttagctgaagcagaaaataggccagccccacctcagtgctgtagcggcgacgttcgctccctaaagtttagtgatttcaagcacgcacatgagcaggtttgtgcgagtata

SEQ ID NO: 2783 - DNA, 234 bp, Zea mays
  misc_feature: Incyte ID No: 700161172H1
atttgtaggacgaggacgctttctttgctgactacgccgaggcccacctgaagctttcagaattggggtaagcggtgctgatagatctatcatctatttctatgtattatgactgaatgattgtatctcttgcactatgcagatttgctgaggcgtaacgaaccagaagagtgtggtggctgtcgtcggccggccggccttgtgtttttgttgtctgcttttctcttgaatgaa

SEQ ID NO: 2784 - DNA, 235 bp, Zea mays
  misc_feature: Incyte ID No: 700161173H1
gtggtggagcaagcccagtccccaatcccaccctgccacccaaccttgcttcttctccgatagctatttctctgctttctctccaatcttcccgggtttccctgattaaagatggctgaatcctttgttctcagtaccggctcgaggatcccatcggttgggcttggcgtatggcaaatacaacctgacgctgccaacgacgccatctacgctgctgtcaaggctgggtatcggc

SEQ ID NO: 2785 - DNA, 235 bp, Zea mays
  misc_feature: Incyte ID No: 700161174H1
ttctagaaagtctgcagagcaggctgtaaaggcgatcaagggcaaagagtccggtgaaccagttccggagtatgactacctgccatacttctactcccgatcattcgacctggcgtggcaattctacggcgacaacgtgggcgaaaccatcctgtttggcgacagtgaccccacctccagcaagcccaagttcggctcgtactggatcaaggacggcaaggtcttgggcgccttc

SEQ ID NO: 2786 - DNA, 234 bp, Zea mays
  misc_feature: Incyte ID No: 700161176H1
  unsure 181: a, t, c, g, or other
cctgcctatctatctagcgagagagagagaggaaagctagctagctagcatggagtgcggcagaagaaggcagcaggcggtgtgttggcgctgctgcttctccagctggtgttagctccgacgacggcgacggcccgcctcctgcaggcggatacctccaccgtggttggcctggacatcntcgcgagggagtttggccatccagtgagaggcatcctctgtggtgaaacctgt

SEQ ID NO: 2787 - DNA, 235 bp, Zea mays
  misc_feature: Incyte ID No: 700161177H1
atcttcggcggctacaccccggagcaggcgagcgggcagagcgccaccatcgtggacgccatcggcaagggcgtggagcagctcatcagcctgggcgccatgtacgtggtggtcccgggcgtgctgcccgtggggtgcttcccgatctacctgacgctgtaccagacctccagcgccggcgactacgaccagtacggctgcctgaagcgcttcaacgcgctgtcggcgcacacaa

SEQ ID NO: 2788 - DNA, 237 bp, Zea mays
  misc_feature: Incyte ID No: 700161180H1
  unsure 125-146, 202: a, t, c, g, or other
acacaagcacttcgacgtcacacgggcgctgcacacagacacaccaagcgtcggcaccaatggcttactaccaggaggtggactactgctcggaggaggtgaggtcggtggccccggccggcttnnnnnnnnnnnnnnnnnnnnnncagcagcacgtcgtcaaggagaagttcgaggaagtcgacacggtcgcacgcgcggngccaaccaccacaacaccatggtcagcacggcggc

SEQ ID NO: 2789 - DNA, 228 bp, Zea mays
  misc_feature: Incyte ID No: 700161181H1
gaaagggcatatcgaggaggtttttagggtggtggtggtgttgtgaggagctgctgccgctgctctccagtctccaccgatggcgatcaagaacatgacggtggcggcgacgacgcggtcgctggacgcggacatgacggtggacgagttcaaggagtggctgcggcggttcgacaggaccaggacgggcgcatcagccgcgacgagctgcggcgcgccctgcgtgcc

SEQ ID NO: 2790 - DNA, 230 bp, Zea mays
  misc_feature: Incyte ID No: 700161183H1
  unsure 139: a, t, c, g, or other
cgtagatcggtttgtgagaccccaacttgtgagcttaatcattcatccgcaatattctagattgtgttctttcttgttcttgcttgtgtcttcgattctcaggcaggaattagccctcgtggcgaggtcaatcgcgcancaacggttgataaccagaggagaagtggtgctgcgattgcggggttctagtcgtgttgattggaagccggatcgtttgtgtgacatctcca

SEQ ID NO: 2791 - DNA, 105 bp, Zea mays
  misc_feature: Incyte ID No: 700161184H1
  unsure 38, 88: a, t, c, g, or other
gtcaactctcactaatagccaagtgttgttacagagtnccacggtgtttccatatacgcaggccttcatgaccaaaaaaaaaaaaaanctggaaagtttttaaag

SEQ ID NO: 2792 - DNA, 119 bp, Zea mays
  misc_feature: Incyte ID No: 700161185H1
  unsure 73-74: a, t, c, g, or other
ggctgaagcagcggaccacgcagagcgccgagcaagcggaggaatgcgtcaggatcaactaccacggcaccannaccgtcacggaagcgctcctcccactcgtgcagtcgtcctcctct

SEQ ID NO: 2793 - DNA, 229 bp, Zea mays
  misc_feature: Incyte ID No: 700161188H1
caaaaaatagttggatcaaaaagacccataatctgctggagctggtagggggttctatatatacaggttcctgaattgccatcgagctcggaggtgtggcttgctaggtgattgagcttggctaacttactcaaacgagttgggaaaggagacttggccggttgggtggtctatacatagaacctaactcaattctagccgtttaagaaaatctgctgcaatatgtggc

SEQ ID NO: 2794 - DNA, 230 bp, Zea mays
  misc_feature: Incyte ID No: 700161189H1
cgcctcgccatcaacgacctgcccaacgacctctacgacgtggcctgggacgtggtgctcatcgacgggccgtccggctggaaccccaactcgcccggccggatgccgtccatcttcaccaccgccgtgctggcgcgctccggcgccaccgcggccaagggccccaccgacgttctcgtgcacgacttccagttcgaggtggagcaggtgctgagcagggagttcctgtg

SEQ ID NO: 2795 - DNA, 231 bp, Zea mays
  misc_feature: Incyte ID No: 700161192H1
agcctctgctcaaggattccgtggataaacaaaatgaagatgaagacgaagttgatgatattgaagaaactgcagatgattctcgcaaacctgcaacatcaattggctcagcataccgattgcttaccccgtcagtgaaggtccagttgttgatatacttcatgctcaaatacgcaatggagattttgctttcggagtcgagtgttatcaccaatcactatttcagttgga

SEQ ID NO: 2796 - DNA, 74 bp, Zea mays
  misc_feature: Incyte ID No: 700161195H1
cttgaaatctgtctacgagatctctaagattatgagatgacatatgaccccctattgcttttgttcactttgct

SEQ ID NO: 2797 - DNA, 232 bp, Zea mays
  misc_feature: Incyte ID No: 700161196H1
  unsure 68: a, t, c, g, or other
ctcccctcccccacctcctcttcctcccctcccgcccacggctggaggtgctcacagcgagcggacgnaggcgagggattcggccgcgcgcatggcgacgcctctctgaccgaagctgctccacccacttggccaggcgcgccgtcctctcctctcccctccccttatcctctcgttacaaaatggcgatgatggtggatctccgaatggaatcgggaaccaaggaaagcat

SEQ ID NO: 2798 - DNA, 196 bp, Zea mays
  misc_feature: Incyte ID No: 700161201H1
  unsure 34: a, t, c, g, or other
gtgacaagtgaattgaagaggatccatgtgaggnaatcacttgctattcacccttgggtgtttcgttgagtgtatgcaacgagttgagcatggatgaaaagtggcatatactgggatgaaaaggacaaatgttaaccacatcattcagaacaattgcatagcttgtatgtgaatccattccagtttttttataaaa

SEQ ID NO: 2799 - DNA, 259 bp, Zea mays
  misc_feature: Incyte ID No: 700161202H1
  unsure 168, 210, 221, 223: a, t, c, g, or other
gggtgttgccatcaactttgtgacccgcgacgacgagcggatgctgttcgacatccagaagttctacaacgtgttgattgaggagctgcctgccaacgtcgctgaccttctgtgatcatttgaagaaaaacagaactaaaagaacggtggtgggggtgatctggtaangcttggttttgccgaaatattgtgggggaagagtgataaggncgtggggttcnangttaaatcgtggtctcgggcaatatgcgattttctt

SEQ ID NO: 2800 - DNA, 261 bp, Zea mays
  misc_feature: Incyte ID No: 700161205H1
  unsure 24, 49, 59, 63, 72, 74, 86, 90-91, 95, 111, 124, 126, 137, 142, 149-152,178, 180, 200, 241, 256, 260: a, t, c, g, or other
gcacgtcggcggctacgacgtgcngcgcggcacgatcgctgctggtcancgtgcacgcngtcnacagggacncngcggtgtgggangacnnggancaggttcgtgccggancggttcgagggcngnaaggccgatgngcgcntgctgannnngttcgggatggggcggcgcaagtgcncnggggagacgctcgcgctgcngaccgtcgggctggtgctcggcacgctgctccagtgcttcnactgggacacggttnatgna

SEQ ID NO: 2801 - DNA, 262 bp, Zea mays
  misc_feature: Incyte ID No: 700161206H1
  unsure 169-170: a, t, c, g, or other
gggctttcttcatccctccacggattcaatgatggaagctcatcatattcaacaccgaagcagtcaaggtcaaggaggccaaaccattctggcgagcaacttcctttcaaccccgcaacgagtggcaatggtttttgatgccaccctacacgatggccacccagattgnntatggaaccaaccattgcagcaagcacaccttactctgctccaagtttgttggcacccgtagatatatgttatttctagttaaattctttgc

SEQ ID NO: 2802 - DNA, 265 bp, Zea mays
  misc_feature: Incyte ID No: 700161207H1
  unsure 54-55: a, t, c, g, or other
ggaccagccgccccaccgaggcggagaaccgggaggccaactccgccatgctcnntaacgtcctctccgtcgtcgtcccgaactgccccgcgctcgtccacgtctgcctccagaccggccgcaagcactacgtcggccccttcgaggccatcggcaaggtcgccgccccggacccgcccttcaccgaggacatgccgcgcctcgactgccccaacttctactacgacatggaggacatcctcttccacgaggtctcccgccgaga

SEQ ID NO: 2803 - DNA, 265 bp, Zea mays
  misc_feature: Incyte ID No: 700161209H1
gaagattcaaagtcaaaggaaagttgtcccctcgcttcattggacctttcttgatcttaaagcgagtgggagaagttgcatatcaactgaagttacccgatcatctgtcagatatacatgatgtatttcatgtgtctcagctaaagaagtacctcagggtacctgaggagcagctaccactggaggaccttagtgttcaagatgatctgacttatgctgagtaccctatcaagattctagacaccctgactcgagttacaagaaa

SEQ ID NO: 2804 - DNA, 264 bp, Zea mays
  misc_feature: Incyte ID No: 700161210H1
  unsure 263: a, t, c, g, or other
atcaatttcctgtagctattaaacggttgcagtttgataagcaactctctatggaaaatgtaaagaagcttataacagaagctgatggataccagcctcacttaatagctccagaacaaggatatcgacgccttatagaatcttgtcttattagtatcagaggtcctgccgaggcagctgttgatgcggtacatgcaattctgaaggacctcgtccgcaaggctatcatgaaacacatgagctgaagcagtttcccacccttng

SEQ ID NO: 2805 - DNA, 264 bp, Zea mays
  misc_feature: Incyte ID No: 700161212H1
  unsure 50, 65, 67, 69, 74, 87, 100, 116, 121, 124, 146, 150, 152, 156, 160,163, 177-178, 183, 204, 209, 219, 233-234, 252: a, t, c, g, or other
attaatcatccactctactactcgaagttactaccagcagcttgcttcancagtagaagagagcnancngaggntggcgtcaccgangccctcgtcggcngccctgctcctcctgncggcngcngccgtgctggcgctggcgcgcncggncntgangcanganaactgcgtgaagannaaganggtgacggttcagaacctgtncagcnacgacgtgangctgacgctggagnngctggccaacagcccgcngtgttcgcgggc

SEQ ID NO: 2806 - DNA, 265 bp, Zea mays
  misc_feature: Incyte ID No: 700161213H1
  unsure 237: a, t, c, g, or other
tacggtctcaggcgcatcggcctcgccgctgcacaacgccggagacgagacgacggcggctgcgggatgacggtcttccacttcctcaactgcgccttcctcaccttcggccctcacgacgtctactactccgccacgcccctgtcagagtatgatacaatcggcacttctataaaagcagctgctgtttatcttggaactgcgcttgtaaagttgtttgcttggcaacattgctcnaagtacctgagaatgatagctttgaccc

SEQ ID NO: 2807 - DNA, 267 bp, Zea mays
  misc_feature: Incyte ID No: 700161214H1
tgtcgaggagctcaaacttgcaagggacatttatgagcatgctgttgttttgagtgtgaaacttgaggaccaagatgcatttgaacgtgatttctgccagctcaagccttattacatggatacatgtggcataattcccccctcaccagaggagtacccaattttgggactcaatcttctgaggctgttggttcagaatagaattgctgagttccatactgagctggagcttttacctgtcaaggcacttgagcatccttgcatcaa

SEQ ID NO: 2808 - DNA, 270 bp, Zea mays
  misc_feature: Incyte ID No: 700161215H1
aaaaagcgctcgagtatgatactgatgaggatgaatccatgaagtcagacagtgaggaaaacagagatgaagattcagatgaagctggtgacaaacaggaaggtgactatgtatctgggaaagaaaaggcagggaagttctcagaggtaaaagaatcttcaggcaaaaagaaggcaaacacagggagtggccaccaatcaggtcctccaaagaaaattatcagaagtccggtaaaaaaagtatcatccaagattcatgaggaaaagaagc

SEQ ID NO: 2809 - DNA, 272 bp, Zea mays
  misc_feature: Incyte ID No: 700161216H1
accgcgaccgggagagagtcagagagagacgcccgcctccagatcgtccggcggggatggcggcgtcggtctttccagcgctgctgctggccgtagcggcggtgcttctcctaccggtggcagaggccgtgtggctcgagctcccgccgtcggggaccaagtgcgtctccgaggagatccagcccaacgtcgtagtgctcgccgactacgctatcatgtacgagtcccaccccagctcgcatcccaccgtcgccgtcaaagttacatcacct

SEQ ID NO: 2810 - DNA, 227 bp, Zea mays
  misc_feature: Incyte ID No: 700161220H1
tgcatggccacgcgcaaatagcacaagaccggttccattcgagagtagcagcacaactcaatgttgtccaagtgaaacagggtgtgggcagaatctgtcacgtttcagacaccggtagctttgaagcagatgtgctagtgtagtgtgtgtttttttttactaccatggttgaggaacctgctttgtactgtatcatctgcaaacggaataatgggcaaagcattaca

SEQ ID NO: 2811 - DNA, 255 bp, Zea mays
  misc_feature: Incyte ID No: 700161222H1
gtgaaggaagcgctcaggttgcactgcccggtgccgctcctgctcccacgcaaatgccgggaggcgtgccaggtgatgggctacgacatccctaaaggcacatgcgtgttcgtcaatgtctgggcgatctgtagggaccctaggtactgggaagacgccgaggaattcaagccggagcggttcgagaactccaacctagactacaagggaacatactacgagtacctcccgttcgggtctggccgtcgcatgtgc

SEQ ID NO: 2812 - DNA, 133 bp, Zea mays
  misc_feature: Incyte ID No: 700161223H1
  unsure 44: a, t, c, g, or other
gtaccatggatgtatcatgaaacatggcagcatccttatattangcaattgtaatatattattcctgtcaagcttatgagaacattggatgacattgtacctggtgtttttatatgaaaactttgggtgatct

SEQ ID NO: 2813 - DNA, 258 bp, Zea mays
  misc_feature: Incyte ID No: 700161226H1
catgcaagcaaactgcattaaagacagtcatgctgctagctgcaaggttacctatcgtttggtggcctctattggctctgccgggaaaggtttggagttcatctaagcgccttccagcatctttgctcccacctttagatggcgggatgtttattgtaatgctggcaaactattatggtgcttcttgtaaatcttactggttgctgattctaccaagtgctcaggttgacatgttgcctgagagtaaattgtttgatg

SEQ ID NO: 2814 - DNA, 247 bp, Zea mays
  misc_feature: Incyte ID No: 700161228H1
  unsure 2, 61: a, t, c, g, or other
gnctcgtcgacctcgacaacaagcccgaatggtttctgaagatcagcccagagggtaaggngcctgtgttcaacggtggtgatggcaaatgcatcgctgattctgatgtaatcacccaaaccattgaggagaagttcccaactccatctctggtcactcctgtagaatatgcatcagtgggatcaaagattttcccagccttcatcacattcttgaagagcaaggatgctagtgatggttccgagaa

SEQ ID NO: 2815 - DNA, 261 bp, Zea mays
  misc_feature: Incyte ID No: 700161230H1
gggaatcgagacatcaatctagtacgcttgtggtgcactcacaagtggacaatagcaggcagtggccacgtcggtcggcgcaagagaggtggcatagtaatggcatgagtttctctgaagatggtgtgggatccgcggaaaggagaccacgggtggagcatagacagatttcattgataaaccaaactataagcgacgacatggattccctgtcgctctcaggccgtgaatcaggcgaccagcctcgtgctagtgtgcgga

SEQ ID NO: 2816 - DNA, 262 bp, Zea mays
  misc_feature: Incyte ID No: 700161231H1
gttaatactaagggcaggcacacctctgcttcgcgctagtgatcaagcaagtgctttctgtactctgcagcaatggcaggcaaggcctcggtcgcgctgttcctcgccgtgaacctggtggtgttcgccatggccagcgcctgcggtggcaactgccccacgccgaccccgtccaccccgtcgacgccgaccccgacgccggcctcgttcggcaagtgcccccgcgacggctcaagctgggcgtgtgcgccaacgtgctggg

SEQ ID NO: 2817 - DNA, 104 bp, Zea mays
  misc_feature: Incyte ID No: 700161233H1
cgatgctttctcacatgctctgcaagccatcccaacaatcatagctgacaatgctggtttggatagcgctgatttgatctctcagctacgagctgagcaccaca

SEQ ID NO: 2818 - DNA, 209 bp, Zea mays
  misc_feature: Incyte ID No: 700161234H1
gcagattgagtcatgatgcagacgccgatgtgtcgatggctgcaattatctcattgggtttgattggtgctggcactaacaatgccagaatagctggcatgcttcgcaatctttcaagttattactacaaagaagctgctcatctgttttgtgttagaattgcccagggccttgttcacctcggaaagggcttgttgaccctttcccca

SEQ ID NO: 2819 - DNA, 246 bp, Zea mays
  misc_feature: Incyte ID No: 700161235H1
agtaatagctcctgagcagtctgttttttacttttggtcaatactcaatacatggaagatgtttggtttgaagaaccacgccatcctagatgaggtggtatattataagttgatataacggctccatactagttattgaggaatgagacgatgattatctcatgtaataataatgcttttccccctctagttattgatgtaagacaattgaggcaaatgaacaaaatgtcacatttgattaaataa

SEQ ID NO: 2820 - DNA, 245 bp, Zea mays
  misc_feature: Incyte ID No: 700161236H1
gacccacagaaacatctctcagaatcataagttccaggctgttggtcttggttgggcttttgctgattcagttttgcaccgactggcacctctctggattggggcaagagggcttgaatttacatgggagtacatatttcaaggacttgaagcgaatgctaatcttgtgatgaccctctcccttgctgcattggggtccttgatgtggcttaggaagaacaagcctaggactttggttccaataa

SEQ ID NO: 2821 - DNA, 247 bp, Zea mays
  misc_feature: Incyte ID No: 700161237H1
attctctttgagcttatatgggagcagtggctgtattggtaatttaagcagatctcagtcacttccagattctaaaccgaagcgatctttgagaaagaaatatcaggattcatcgactggaaacagaagacgatggcaatcgggtctagaagcaatggagaagaatgttagcatatctgtttctcttgaggggaatatctcttctattcccaattcaatagccaacgactctaaaacgtcaatggaa

SEQ ID NO: 2822 - DNA, 247 bp, Zea mays
  misc_feature: Incyte ID No: 700161238H1
  unsure 237: a, t, c, g, or other
aattgagtcaacaaccggaaatcacattagactctgcgttgtttgaacctaggagctcaatatttgaggatccggttgaatcaaaatgtgctgggtttactaatttgaaagatgaacatgaggctctacctggctattcaggcccggtgtcaccatgtgctggttcctccatatctgctaagaatgaaaacaatgattccattggaatgacagctgaatatctttctcagacagtangaacaggagt

SEQ ID NO: 2823 - DNA, 250 bp, Zea mays
  misc_feature: Incyte ID No: 700161239H1
agcacatcgacccgctgctcgagtgcctcaaggagtggaacggcgcgcccctgccgctctgctgagctcagctgcacgcacctgctccgcacaaagaaggaaaaaacaaaagtatagcggctcaagacagtgtttcaagatcgtttatttacaaccagactagcagaagatgctctctatatctaccgtcgccttgtattattagtagctgaagtaagttcatgtgaatgttgtcgtgttcccgcagctg

SEQ ID NO: 2824 - DNA, 250 bp, Zea mays
  misc_feature: Incyte ID No: 700161241H1
  unsure 233: a, t, c, g, or other
caactgtgtggcaatattacagcggagttcaatgattgctcaaaacaagtccttgaaataatttccctgctctcaatgccagaatttagtcgcagcgatcttgccgatttactgaagggtgttcaagcacatgagaaagagaagttgcatttgacagctaagattcaggtgctgaagaaagccggcaggccttcagagcgcctggtgaaccacgcagactgcaggtcgcgcanatggcccagcacgtgtg

SEQ ID NO: 2825 - DNA, 251 bp, Zea mays
  misc_feature: Incyte ID No: 700161242H1
  unsure 250: a, t, c, g, or other
gcgccttttgctggtaacaatatgctggttttatatcaatgtccaagcaaaatttcggatggcagcacaatctctggaggccgaaacaactcttacttagttcaagttctacacaacgaagtcccagtttcaatgcctgggtgcggcaacaaagatttctgtccgttcgaggagttcaaggagaaaattgtgaaaccgcacctgaagcacgactacaacatgatatgcaaggtcaaatccccagcggcang

SEQ ID NO: 2826 - DNA, 251 bp, Zea mays
  misc_feature: Incyte ID No: 700161243H1
  unsure 36, 54: a, t, c, g, or other
gtacaaggagaggctcgcaggggtcgtcggagacanggccgccgccgcaggatncgtggccgaaagcctgttccttgtctgcgccgggtcggacgacatcgccaacaactactacctcgcccccgtcagacctctgcagtacgacatctccgcgtacgtggatttccttgtggagcaggcctgcgacttcatgaggcaactgtaccagcaaggggccaggaggatcgcggtcctggggatgccgccggtcg

SEQ ID NO: 2827 - DNA, 250 bp, Zea mays
  misc_feature: Incyte ID No: 700161244H1
tctagttctggcctggatgtgcagttttaacttcaattatgaacccagatctataaagttgattctgtgtgtcatattgcaaatggaaacatctgacatttactgtcattgttctttaaccaacagttccacatatcttctgacatgattccttttaatagtctgctggaaaaatgggagaacagtatgatccatgcactgagaagcattcaactgtatacttcaatctagctgaggttcagaaggcact

SEQ ID NO: 2828 - DNA, 252 bp, Zea mays
  misc_feature: Incyte ID No: 700161245H1
accactctagctatagcaagctagagctatacacacgactttgtgcaacaatcaccgacacacacagctagagctagagatggcggcgggaaagctggggcagcagctgatgacgaggctgcacctcgcgaggacccgatcgtcggcgacggcggacgtgccgcggggccacctggcggtgtacgtgggcgaggggcggaagcggctggtcatcccgacggcgtgcctcagccacccggccttcgtcacgct

SEQ ID NO: 2829 - DNA, 255 bp, Zea mays
  misc_feature: Incyte ID No: 700161247H1
ctgatcgatcatcatcaggcggaggcgatgcgacgatacagaactttgtacatgcgtggtgggtgtaacatagtggctggcaacaagccatgctcatgcaaaccgatgaatctatctctgtatcatgcatcgatctcggttgcttgctagtccagactccagactccagacatggctatatatagctggtgctaataaataggagtataatcgtcatatcgatcggttgcgtgtggaatgccaatcaagtgtgta

SEQ ID NO: 2830 - DNA, 245 bp, Zea mays
  misc_feature: Incyte ID No: 700161249H1
ccaagggctcttccaacagctacgccatcaagaagaaggacgagattgagcgtgttgccaaggccaaccgttgagtggagcttgtatcctggtgcacttgcactagtactacgtttctggcagtcgtattttttcttgtgtttttacccatgtttagactttgagacctatatctaaggttttggttctcagtgaacaatgaaaattactgtgaaatgcagttgttttggtgcagaaatgccccc

SEQ ID NO: 2831 - DNA, 240 bp, Zea mays
  misc_feature: Incyte ID No: 700161251H1
  unsure 77: a, t, c, g, or other
cagtcacgtacagcaaagcagccaggtaccagctgcctgagggttgggtagatgggcaagctgtgctgcagcaacgnggcggaggaggaggccgggttcaacctcctggggctgctggtcgccgccatcatcgcgctggtgttcatgctcctctgcgcgccgcccaggaggcgctgcgtcgccgtctacccgtgctgctgacccctcagtcagcgctcggcctcctcgctctgccgctgc

SEQ ID NO: 2832 - DNA, 112 bp, Zea mays
  misc_feature: Incyte ID No: 700161252H1
aatggagcatgattatgacattgggaccaccataagggataagattatccctcatgcagtttcctggtttactggtgaggctgtgcaaggtgaggattttggtgagttgggc

SEQ ID NO: 2833 - DNA, 237 bp, Zea mays
  misc_feature: Incyte ID No: 700161254H1
aataaagtcaaggtacccaaaaacaaacccatgggatataatgcttggcatgaacctctgggggaccatatataatgctgtaattatgtttgttgcgccattactattcagtaactggccatatgcaaatggttttgaggcattgagattttgccaggagaacccagaggtggcctgggacattttcctattctgcctatgtggcgccgtggggcagaacttcatcttcttaaccat

SEQ ID NO: 2834 - DNA, 235 bp, Zea mays
  misc_feature: Incyte ID No: 700161257H1
agagagagagagagcgcatagtcgatcatgaagggtggcaagaaggaagtggccggtgcggtggtggccatactgctggttctgcagctcatggcagctccaccgacggccatggccgcccgctcgccgcacggagccgtgccggatggctccctcgccacgacgcccaaggtgacgatgctgtcggccacgctgtgctacacgggggagacatgcaaatacatggctgcctcac

SEQ ID NO: 2835 - DNA, 189 bp, Zea mays
  misc_feature: Incyte ID No: 700161259H1
tcggtacaaggatcaccgctgtgcctgcgcgtgctgcttcaccgaatcgagtcagatcctgtccgaatccgagctaagggatggcaaccggtagtgaagcctcgaaggcagctgaggctgtggttgactggcataaacacgacagcaagaggatgctccatgcggtttaccgtgttggggatctggacc

SEQ ID NO: 2836 - DNA, 238 bp, Zea mays
  misc_feature: Incyte ID No: 700161260H1
atccatttgatccgtatttctctctccttaaggttggtggtgtgatgacattggtaggttttccaagtgagatcaaaatgcatcctgcaagccttatacttggtgcgcggaccttgtctggcagtgttgttggaggtataaaagacatccaagaaatggttaacttctgtgcagccaacaatatctatccggagattgagatcattaagatagattatatcaacgaggctctcgcgag

SEQ ID NO: 2837 - DNA, 240 bp, Zea mays
  misc_feature: Incyte ID No: 700161261H1
  unsure 55: a, t, c, g, or other
ggtcaccgtgtgtgtgcgcgccatggggattcatctgccgccgcctgccctcgcnttctgcctctcggcgcccactcggttccagtggccgcttcgaggaggcgctcgcgcgcatcgaggagctccaggagcgcgacactggcgccgacgacagcagcacagcctcgtcgttcttgagcgacggagaggcggcgtcgcggccagcaggcgagcagcagtcgcactccgcagatttttgag

SEQ ID NO: 2838 - DNA, 243 bp, Zea mays
  misc_feature: Incyte ID No: 700161262H1
  unsure 167: a, t, c, g, or other
taaaataactcggccggggagggaaagaccgccctcccggtattatattaagaagagaccgaaacatggtcccggccgagaaaatccccgaaccctggccccccatcactagcgggccgtcaccgcccactctgcaacggcccagccggagggtggcgcgcaggacntaacccgggagcgggtggggcacagcgaggggatttttttaaccaagccagaaattcgcccccgaggggaatcgaa

SEQ ID NO: 2839 - DNA, 245 bp, Zea mays
  misc_feature: Incyte ID No: 700161263H1
accgtcgacctgatccgggtgcgccgctacaacgccgagtgggcgctgaccgagcagctcgacgtgatcagcggccacttcgacgacatcgaggacgagtacctgcgcgagcgcaaggccgacatcgagcaggtggtcgagcgcgtgctgaaggcgctggccggcgcgccctcggcctcgcaggcgctgggcggcgcggccggcggcaaggacgacatgatcgtggtcgcgcacgacatcgcgcc

SEQ ID NO: 2840 - DNA, 201 bp, Zea mays
  misc_feature: Incyte ID No: 700161265H1
  unsure 170: a, t, c, g, or other
cattgctgccgtctgcgtctgtgtgggattgatcatgaagagcctgccacaagttggttgtatgaagcctttcctctgggacaatatacgttggggccccaattgatagactgcagaagagccagcccgattgtatcagtgtatgatgaagatgtttgcgccgagcgaantaggcaagttcacaggttttactataaacag

SEQ ID NO: 2841 - DNA, 235 bp, Zea mays
  misc_feature: Incyte ID No: 700161266H1
ttcgttgcccccattgaggcccaactccttggaatcttcggtacttggctgccgggcgcggcgcttggcggccatggaagcccgatcgatggtggagggaagggatttgcgattttttcagacaattcctttgaagccattataaaagatctgaattgcagacgaactactcaaaaagttgtcactacttcagtgccattagaaagcaattttttatccttaaataccactgccg

SEQ ID NO: 2842 - DNA, 234 bp, Zea mays
  misc_feature: Incyte ID No: 700161267H1
gaagcacattgacttttcactgtcaagcccattcggtggaggccccgcaggaagggtgaagagaaagaatcagaagaaggcaagcggtggcggggatgctggtgatgaggatgaggagtgaggatggacaagtagtgttacaccaatataataatattatctagttttcttgaacttgttcgaatgatgagtgcttagctgtgtgatctgacgcagattcccctgtgctgactc

SEQ ID NO: 2843 - DNA, 235 bp, Zea mays
  misc_feature: Incyte ID No: 700161268H1
gagatccatgcttcctataccaacaatccacctctaaaacggagttccagcaggaataaagccaagtcgccttcgaaagtggccaaaactggtacagaaaaacatcatcagaaggaaaagaaggtgaaggatcactgcatggagggatgtggaagtgacagcgataactcaagtgaaaagaaatcaaaagagcggttcccaaggaagaaatggctgaaccttccattcaaacttg

SEQ ID NO: 2844 - DNA, 236 bp, Zea mays
  misc_feature: Incyte ID No: 700161270H1
  unsure 123, 142, 168, 179, 211, 216, 224, 226, 228, 233: a, t, c, g, or other
cgcgagttcacggccatggtcgccgccggggcgaccatgcagcccggcggctacgacggcgccgccgaccagctcaccagcatcggcgaggacgagctggaggagaccaacccgctggccatngtccccgacagccacccanatcgccacgcccgccaggtccagggncgtccgccgcngggctggaggtcgtgcccgcgggcccggcggncggcnccgcaacngnanccgcnacg

SEQ ID NO: 2845 - DNA, 230 bp, Zea mays
  misc_feature: Incyte ID No: 700161271H1
  unsure 196: a, t, c, g, or other
gttacctgctgatccgtccactcctattatcatgattggtcctgggacagggctggctccttttagaggcttcttgcaggaaaggttagcattgaaacaatctggggcagaattgggcacttcaatccttttctttggatgcaggaaccgtaatatggactacatatatgaagatgagttgcaaactttccttgangagggggcgctttctgagctaattgttgcattct

SEQ ID NO: 2846 - DNA, 232 bp, Zea mays
  misc_feature: Incyte ID No: 700161273H1
ccaacttctcctcgctcctcgccaccgtggaggcggagctggccaagggcggcaaggccgagttcaacaagctcaacgacgtcacctccttcgacttcatcggcgaggcctacttcggcgtgcgcccctcggcgaccgagctcggcaagggcgggccgagcaaggcggccaagtggctcatctggcagctccacccgctggtcacgctcggcctccccatggtcctggagga

SEQ ID NO: 2847 - DNA, 229 bp, Zea mays
  misc_feature: Incyte ID No: 700161274H1
atccatttatcttatcagtctttgtcagtggtgtggataggtgtcaagtctgtagcctagatgcatgattcagttggaattatgcagtgccgtgtctcgagtactcagttctggctgttgcggttgtgcatcttaccttctgttgctggttttgtttgaggccatgggcatctcttggtcctatgctgtgagagcgctgtaatgtgggtaccaaataatggagctgctt

SEQ ID NO: 2848 - DNA, 237 bp, Zea mays
  misc_feature: Incyte ID No: 700161278H1
  unsure 74: a, t, c, g, or other
cccggacgcgccgctcttcatcccggcggcgctgctgcaggtggaggacttctcgccgcagtggtgggacctcntcaccaccactgcctggttccgcgaccactggtcccgcgagcgcgcccacctggacgagatggccgagcagatcgacgcggccggcctcctccccgacgacgaggacctcttctacgacgaccagctcgagcagggccccgtcgccgccgcccttaagacaga

SEQ ID NO: 2849 - DNA, 239 bp, Zea mays
  misc_feature: Incyte ID No: 700161279H1
agcagctacatacgtcctcctccattaatattggcagcaagctagctaggatcatcagcatctgagcttattattactaaatcgatcggttgccatggcgatgagagtcggcaagctggcgctggctgcggtgctgctgtgcgcggcggcggccatggccacggcgcacaggcctccggcgtgcgcgccacctacaacttctacaacccgcagcagaacaactgggacctcaacgccgt

SEQ ID NO: 2850 - DNA, 243 bp, Zea mays
  misc_feature: Incyte ID No: 700161280H1
gcgtgcttatccgcccccgccggccatgtcgaagcaaggagggaaggccaagccgctgaaggcgcccaaggccgacaagaaggagtacgacgagacggatcttgcatatctgcagaagaagaaagatgaggaaaaagcactgaaggagcttaaggccaaggcacagaagggcgcgattgggggctcgggtctgaagaaaagtggaaagaaatgagactggtcacccgtctccaatacctagag

SEQ ID NO: 2851 - DNA, 232 bp, Zea mays
  misc_feature: Incyte ID No: 700161281H1
tacaaggctaagaccaagagcagcgagacccgctacaggtgcatctggggcaaggtcacccgcccgcacggcaactcgggcgtcgtccgcgccaagttcaagtccaacctcccgcctgagtccatggggcgcaaggtcagagtgttcatgtacccgagcagcatctaaggttaggtttttgttggagtaaaggtggactctaaatggccatgcttagttcttctctctgagc

SEQ ID NO: 2852 - DNA, 68 bp, Zea mays
  misc_feature: Incyte ID No: 700161282H1
ctatataagctggccaatcgcgcctctacacaaacacaagtgtgcatcagtgcatgtgttttcagatt

SEQ ID NO: 2853 - DNA, 228 bp, Zea mays
  misc_feature: Incyte ID No: 700161283H1
caggcaacagcccagccgctgtcgccctcgttccgtagtacggcgccgccagatcgtcagtcaccatgatcatctccaagaagaaccgccgcgagatctgcaaatacctcttccatgagggggtcttgtacgccaagaaggactacaacctggccaagcaccccaagcttgatgtgcccaacttggaggtgattaagctcatgcagagttcaagtcgaaggagtatgt

SEQ ID NO: 2854 - DNA, 227 bp, Zea mays
  misc_feature: Incyte ID No: 700161284H1
tccgaaaggatcttagcggatttcggtgaggcggcggcggaccccgacgccgtggccgagctcccaccccttctccgggcgcgcgctttccttgccttggcgcaggccgcgacctcccttctcggagttcgtttaaggtgttcgggagttgaccctgacgagcaccccatcagaaaggagtttgaaaggttaagcctaatgcaggagaagttaaatcaatttgagag

SEQ ID NO: 2855 - DNA, 228 bp, Zea mays
  misc_feature: Incyte ID No: 700161285H1
  unsure 46-48, 52-53, 55, 60, 65, 68-69, 71, 74-75, 123, 135-164, 182: a, t, c, g, or other
ccaaaccccacacgagcaaaagcagagcacacagcacaaacctctnnncccnncnctgcnccgcntcnncnggnntccattccccatcccccatcccccatccaccgccgtcgatggcgaggncgacgcgcgcgnnnnnnnnnnnnnnnnnnnnnnnnnnnnnngcgctggcggcgctggcncgcgcgtcggggtcgggcgacgttccggcgtcgtctctgagctggg

SEQ ID NO: 2856 - DNA, 225 bp, Zea mays
  misc_feature: Incyte ID No: 700161287H1
gtctcccgcacgccgacccgcagccgccgccgttcgccatgggtttcctcgacgcgctctaccgtgtggtgatgcgccgcaacgccgtctacgttaccttcgtcgtcgccggcgctttcgcgggcgagcgggcggtggactacggcgttcacaagatctgggagatgaacaacctcgggaaaaggtacgaagacatatcggttttggggcagaggccagctgagg

SEQ ID NO: 2857 - DNA, 226 bp, Zea mays
  misc_feature: Incyte ID No: 700161290H1
  unsure 74, 111: a, t, c, g, or other
cgtacccgtaccacgcctccaacggcacctgcgacggcgcgcgggcccggcgcgggcgggtcgtggcgatcganggccaccaggctgtgccggccggcagcgaggacgcgntggccaaggcggtggcgcaccaaccggtgtccgtggccatcgacgcggggggccaggcgctgcagttctactcggagggcgtgttcacgggcgactgcggcacggacctggacca

SEQ ID NO: 2858 - DNA, 226 bp, Zea mays
  misc_feature: Incyte ID No: 700161291H1
ctccaccgtgggctgcgacaaggaccacaactttgagccgccgtgccgcaacaacatcgtcgacgggtcgccggaggtgtgggacgctctggggctcaacaaggacgacggccaggcacagatcacctggtccgacgagtgagcgactgtaccaccgctgcaccggccgggtgcgctcgtgcaagtgcaccggccggcacgtctcatgttgccaatatataataag

SEQ ID NO: 2859 - DNA, 230 bp, Zea mays
  misc_feature: Incyte ID No: 700161293H1
cttttgactgtgtcaagatcatgaccaacctcatgaacatagcatgcttgttggtagtacaatctaattatagtctcaacaaaaggagtgctgtagatgtattatccaacattatcaaggaatgtctgcacgatcatttgtacattacgagatcaaactttgcttcacatctgcaattttgttttgatggaagttcatgctgctatctctctgaagagtgggagggtgaa

SEQ ID NO: 2860 - DNA, 110 bp, Zea mays
  misc_feature: Incyte ID No: 700161294H1
agcaatacctcccaacacgttaaaacggggtccaaaattcaccatgattatgaagaagctgtacagctgatggaaacgtaggctcattgcaaatcaataaaatgtactcc

SEQ ID NO: 2861 - DNA, 235 bp, Zea mays
  misc_feature: Incyte ID No: 700161295H1
  unsure 81: a, t, c, g, or other
ctcctcggttgcgcgtccctcgcgatcggaggagcagccatggccggccacgtcctcggcggcgtgaaggagaacccagangcggccaacagcgccgagtccgacgggctcggccgcttcgccgtcgacgagcacaacaggcgcgagaacgcgctgctggagttcgtgcgcgtggtggaggccaaggagcaggtggtggccggcacgctgcaccacctcacgctcgaggccgtcg

SEQ ID NO: 2862 - DNA, 237 bp, Zea mays
  misc_feature: Incyte ID No: 700161296H1
  unsure 40, 43, 51, 61, 99, 127, 133, 136, 138, 154, 189, 196, 216, 220, 222,230-231, 234: a, t, c, g, or other
gtagccatcagccttctcatcgccaccaatggccactgcngangtccagancccgaccgtngtggcggccgaagaagcgcccgtggtggagaccccgcngccggccgtcgtgcccgaggagtctgcncccgcngangncgaagccgaggccgangctgctgctcctgctgatcccgaggagcttcccgnagacgancagcaggcagccgccgaagnggangncgcggctnntgntgg

SEQ ID NO: 2863 - DNA, 133 bp, Zea mays
  misc_feature: Incyte ID No: 700161301H1
ggcgctgatgcagctggccgccgggtcgtcgggctcctcggcggcggcgcccaataacaaggacgccccagtaccagtggtgcgggtgccagagcagccggcagccaccgcgccattggcagtcgtgacctcc

SEQ ID NO: 2864 - DNA, 269 bp, Zea mays
  misc_feature: Incyte ID No: 700161305H1
  unsure 259: a, t, c, g, or other
ctcagatattgctgagggctgctaaactccaggagcaatcttggactataattgatgacgttgaatcattgaaggcttcgtctcaattttattcaagcctttgttgagggaagttgggcatgatctgtcagtgtgtgcaaagcgcgtaacttggacattgccgaggcccgctaaggtgcaagaatttcgtggatcataatagatgatttaggccccttctgcagatcaaccgccatgttatctatggccggcttgaaantgaacagcac

SEQ ID NO: 2865 - DNA, 180 bp, Zea mays
  misc_feature: Incyte ID No: 700161307H1
agaaattcaatagactctacaagcagaaactggatgagattgtcgaaagaggcgaaatatccctggacctggcactagaggtatcatcgccaggcgcagagaggcttctgaaggtgcctgaggatctggaccgcttcaaggacatggctatgagggtgcagtacctcgctgaaggcaaca

SEQ ID NO: 2866 - DNA, 84 bp, Zea mays
  misc_feature: Incyte ID No: 700161309H1
  unsure 23, 34-36, 46-47, 59: a, t, c, g, or other
ccacacttgacgtagtgagagancatacgtttgnnngagaggttcnncgacttgaccanagagaggtaaatgttccagtcattg

SEQ ID NO: 2867 - DNA, 132 bp, Zea mays
  misc_feature: Incyte ID No: 700161311H1
ccttgcacacttgcacttggttggagctcctctaccttttccatcgctctgctctgctccgcgtctccgtccgccccggcaaaagcaaaacacagccatggaggggtacgaccgcgagttctggcagttcag

SEQ ID NO: 2868 - DNA, 122 bp, Zea mays
  misc_feature: Incyte ID No: 700161312H1
gattattcttggcttctgtgttcactgcctagctagtctccgggtcaaatgtatttgctcatttacttcaaaaaaatgtatttgctcattttacatgtaataataagaatggatctatatat

SEQ ID NO: 2869 - DNA, 266 bp, Zea mays
  misc_feature: Incyte ID No: 700161313H1
cgatgcctagcagctctgtcctgaacggcactccgtcggaagctctcgtggacacgcacacctccagctcctccccgtcctacgaggtccacggcgacggcggcaccgccagcgtctctttccctcaggacagtggcagctacatggtgcaaacagtaggtgagccaaggcaagagctgttcagccaagtggtgttcagtaaccacatgtgccctttccagtagggagagagcgagaggatggaaggacgacaggaagcatatgtt

SEQ ID NO: 2870 - DNA, 268 bp, Zea mays
  misc_feature: Incyte ID No: 700161314H1
gactactcttatttcatgcacacactataccttgttgtactcatcaatgtctagaaccaagattttgttcaacaattctagtgaataataatgaagataggcatgaccctaaacgtaaatttttgttaagattcatagtgtttgggattttaaaaaaactacattgttaataaaaaatcactaattttccacatttaattgcagcgtgaacaaagagagaagcattgtgtctccactgttcagtgttacatgaagcagcatgaactaa

SEQ ID NO: 2871 - DNA, 262 bp, Zea mays
  misc_feature: Incyte ID No: 700161319H1
agcaggttattccccagaagaggagtgctaaaatccatgacttctgccttgggatcccttttggtggtcttttattctctatggggcttctaggatacatcttctccagaagcaccataagtcttgtcttgggcattgcaccagggctagccactctgctacttggcactctcagtctgaagttctggaggagcggcagatccagcttcctgcttatcttggctcagcaatttctgctttcctggcatggaaatacccccat

SEQ ID NO: 2872 - DNA, 261 bp, Zea mays
  misc_feature: Incyte ID No: 700161321H1
ggaaggaacaaattgtacaaggggatgttgatgatatgatggctcaaaggttaagggctgttttcatgcctcatggtcttggccacttacttggtattgacacccatgatccaggaggctaccctgagggattggagaggcccaaggatccaggactgagctccttgcggaccacaagagaactgaaagaaggaatggttatcacagtggagccaggctgctatttcattgatgctttgctaactaaaacaagggatgatc

SEQ ID NO: 2873 - DNA, 261 bp, Zea mays
  misc_feature: Incyte ID No: 700161322H1
  unsure 246: a, t, c, g, or other
gcaataatggccgagaagggcgtgaaggtgttggggatgtgggcgagccccatggtgatcagggtggagtgggcgctgaggctgaagggcgtcgagtacgagtacgtcgacgaggacctcgccaacaagagcgccgacctgctccgccacaacccggtgaccaagaaggtgcccgtgctcgtccacgacggcaagccggtcgcggagtccaccatcatcgtggagtacatcgacgaggtctggaanggcggctaccccata

SEQ ID NO: 2874 - DNA, 209 bp, Zea mays
  misc_feature: Incyte ID No: 700161324H1
ggggcggtggtacgagatcgcgtcgttcccgtccttcttccagccgcgggacggaccgcgacacgcgcgccacctaccggctgctggaggacggcgccacggtgcacgtgctcaacgagacgtggagcaagggcaagcgcgactacatcgagggcacggcctacaaggccgaccccggcagcgacgaggccaagctcaaggtcaattta

SEQ ID NO: 2875 - DNA, 174 bp, Zea mays
  misc_feature: Incyte ID No: 700161325H1
  unsure 124: a, t, c, g, or other
catcctcgtctacaagggcatcgtccgcgaattccatatgcaggacgaggatgcaggtcggccatacaggaagttcctgtaagcggcgtccagggctgcaggatacgtcgattcctcgaccggngctgcgaggaggggagtttccgttcagtttgtgtcggtattgttttagtc

SEQ ID NO: 2876 - DNA, 161 bp, Zea mays
  misc_feature: Incyte ID No: 700161326H1
cggaccttggcggactccacgacgcctgcaaggactggggcttcttctgggtggagaaccacggcgtggacgcgccgctgatggacgaggtcaagcgcttcgtctacggccactacgaggagcacctggaggccaagttctacgcctccgccctcgagttc

SEQ ID NO: 2877 - DNA, 64 bp, Zea mays
  misc_feature: Incyte ID No: 700161327H1
  unsure 61, 63: a, t, c, g, or other
gattggtttagccactgtaaaaatgagattgctactgctacattcattgtcatgttaaaanana

SEQ ID NO: 2878 - DNA, 259 bp, Zea mays
  misc_feature: Incyte ID No: 700161328H1
cttctgctacaccaagcctgttttcaagatatggagtccgtggtttcccagccattcttcttgtaaatgagactacgatggttcgatatcggggttcaaaagatcttaactctctggtcgatttctataaagaaactacaggtctcgatccaattgcatattgatgttgttgaacaagagagcacaggaagcttgagctcagttatgccatgggatcgttctattcgtgaaatggccaaagatgagatgtattgttagt

SEQ ID NO: 2879 - DNA, 187 bp, Zea mays
  misc_feature: Incyte ID No: 700161329H1
aagttatcctcctctgtgtagcatctcccgcgcgctagggctcgagtaggatggctgctatgttgtaccgtcggctgtatatatgatttagtgacacatgtgaagcctgccatgtaatctgatagcgctggctccctccctccctcccctccgattcactaaagctaatgtataatttgtattgcct

SEQ ID NO: 2880 - DNA, 262 bp, Zea mays
  misc_feature: Incyte ID No: 700161330H1
gagaaagaaatacagaacaattgtaagcactgtcagtgtgctagagaaagtaatacttcggtggcgccggaaaggtcatggcctacgtggcttccgagctgagcagcaaccaatggtcgaagcaatagaggaagatgatgaggaagacgacgatttcgatgatgatgaagcagtcaaggtcttccgtcggcagaaggtcgatcaagctgtaaaagaggctgtgtcaagggtgctgtccatggtagactctaccgaagcgagg

SEQ ID NO: 2881 - DNA, 264 bp, Zea mays
  misc_feature: Incyte ID No: 700161331H1
gagaagctgcacagtctaccgaccagaagtttgaacacatagacatgtcagaaaagcgaaaggtcattaatgagtgttcggaagcagagacttggctaatagagaaaaagcagcagcaggatgctctgccaaagcatgctaatccggtactccttgctgctgaccttaagaagaaagctgaaacacttgacaggttctgcaagccgatcatgacgaaaccgaagccagctcctaagccacagactccgcctgtggcagaaaacc

SEQ ID NO: 2882 - DNA, 264 bp, Zea mays
  misc_feature: Incyte ID No: 700161332H1
cttctaccctggccttatgacccctgttggatgtggagtcgctggcagccaatgcgttgactttccaatgcagtacagcaataacattcatccttactcgggccccgaatttggttttctgcctgcaaaaccagttcacaagaccccagtgagcttccatgctgtgccagtgccaccactggccccgctgtgtagaagcgaggtgccagtggtgataaatcaagagaggcagcagggctctgcaccccctaaattcaaacaggc

SEQ ID NO: 2883 - DNA, 257 bp, Zea mays
  misc_feature: Incyte ID No: 700161334H1
gcgagcagctccagctcgtcgtgtccttccactgacactgccgcgccgccggcggcagacgcctctcgccccactactcggggcacggtggaaggctatatgatcgtgcagaagcagaattgaagtcgcaatggtcagcatgcttatattaccagttaccatgcttaattgcatagttgcactgtagtgatcaccgcagaaagatggctctgtgtggaatagagtagtagcttaagcacatttcgtattacaggaaa

SEQ ID NO: 2884 - DNA, 156 bp, Zea mays
  misc_feature: Incyte ID No: 700161335H1
  unsure 24, 33, 61, 75, 107, 131, 149, 152: a, t, c, g, or other
gtcgtcgcgtcgctggcacgggcngcgttcacnaccctcgcgcgcatcaaggccgtcttcngcgccggccgggancatcgccacccgccgctgtaccgcagcctganactctcctcggcggtgcacccgtnaggcgacgcgcggtcccngcngtcg

SEQ ID NO: 2885 - DNA, 251 bp, Zea mays
  misc_feature: Incyte ID No: 700161341H1
  unsure 179: a, t, c, g, or other
cacaagatgattgtagtaatagtaaccatgagttattcatctgttgcacttcatgtatgtgacgaaggggaagtcctcctacctttgccagaggaagtttgttgtgatgtaaattagttttagcgcctggttagatggaccaaatcttggcgatgcgccaggattttggacttaattcnttatccatccacggaattgggcaggatttcatccatgcaaactgggcatagtgtggttgaaacagcctgtac

SEQ ID NO: 2886 - DNA, 90 bp, Zea mays
  misc_feature: Incyte ID No: 700161343H1
  unsure 2, 43, 76: a, t, c, g, or other
ancccgaggggctggaggacgaaccctcgaacaaacgccaganagccagcggcgacggggaaccagaaggacaganggccagcagcgacg

SEQ ID NO: 2887 - DNA, 221 bp, Zea mays
  misc_feature: Incyte ID No: 700161344H1
gacgtgcagggagacgtatgtgttggatctccacatactgagcttcgtgaacggggcggagcgggaggagcacgagtggaggaggatcttcctggcggctgggttccgtgactacaagatcacgcacacccgaggcatcccgtccatcatcgaggtcttcccgtgatgatcatggatcgagagtcgatcatatatgcatgtttgtacgtgtttgtgtcata

SEQ ID NO: 2888 - DNA, 256 bp, Zea mays
  misc_feature: Incyte ID No: 700161345H1
ctagggtttgctcgcgtctcctccttcccttggctgctgtcgtgccggtcggcggcgacagcaagggagggaacatgtcgaagaagaacaatcttgccaagaggaagaagcagtacgagttcgacctccaacgggagaaggaggccaaggagaagcaggccaagatgctgcaagccaagaaatccaagatgaagatagatggtgctgaaaagaaacgtaaaggtggccaatttaaagtcggcaagaaaaaggtgaa

SEQ ID NO: 2889 - DNA, 256 bp, Zea mays
  misc_feature: Incyte ID No: 700161346H1
cttctccgacgcatcttcggcgtcgttaaagctggagcaggctctacgctccgatgtactcatccctgctccacaccggctcagctgcgtccaggcaatctctatttcatcatggattatcttcttcaggacaccatcacaactcttgttccactgcattgttgccctttcatgacttgttgaatgtttgaaggtgggttcgaccttcgcttatggtcatggaagatgcgacgatgccaaaactcttgcagagctc

SEQ ID NO: 2890 - DNA, 253 bp, Zea mays
  misc_feature: Incyte ID No: 700161347H1
caggttctgcgaggcgatcgccgcggctgcgctcgccgggcttgtactgccgctcgtcgaggtcgccacggcgcgctacggccgtcggacgggacccgcggcgagggtgccgccgccgtacgcgaccgtgatgcagatgcaggctgtgatgggcgccgccggcacgtggtgtgcctgcttggcatggccgtcaagagcgacttccaggcggtggcaagtgaggccgccacgtttgggcttggcgagaccaata

SEQ ID NO: 2891 - DNA, 257 bp, Zea mays
  misc_feature: Incyte ID No: 700161348H1
atcaaggcgttcgtcatcgacgtggtgacgtctggttcagacacgtcggcggccatggcagagtggatgctggcggagctgatgaaccacccggagacgctgcgcaaggtggtagaggagatcgacgctgtggtcggcggcggcaggatcgcgagcgaggcggacctgccgcagctgccgtacctgatggcggtatacaaggagacgctgcgtctgcacccggcggggcccatcgcgcaccggcagtcgacggagga

SEQ ID NO: 2892 - DNA, 154 bp, Zea mays
  misc_feature: Incyte ID No: 700161349H1
  unsure 98, 132: a, t, c, g, or other
gtgttagcagagctgccgaactgaataagttactttgtgaatgcaacttcccatcaatctgcattcattctggaatgactcaggaagaaaggctaacnagatataagaacttcaaggaaggccacaagaganttcttgtggctacagatttagt

SEQ ID NO: 2893 - DNA, 182 bp, Zea mays
  misc_feature: Incyte ID No: 700161351H1
  unsure 180-181: a, t, c, g, or other
caaaactgtcaataatatgaaccattctgggattactttaaaagaaaagagcagcgatcctcctgtcagtaacaagaaacaggattctgcagttgagcctgcctccaccgcaccaaagagaagaaaggttttgaagccagcaacaagcaccgacaaaatcaaagctccaagcaaaacggnng

SEQ ID NO: 2894 - DNA, 227 bp, Zea mays
  misc_feature: Incyte ID No: 700161353H1
  unsure 62, 219: a, t, c, g, or other
gctgatcatggttctcatccatattactatgtgccagctcagcaggtgcaaggagcaggtangatgtatggtggccagcagggtcacccagtgacttatatgtggcagacgccgcaaggcaagcggcagagccccccgaagaggagcagcagcagtctgcctgaatgtagcaaatagacgataacagcaaagcaattacatcttgatctgaagttctgnacttagtt

SEQ ID NO: 2895 - DNA, 253 bp, Zea mays
  misc_feature: Incyte ID No: 700161355H1
  unsure 218: a, t, c, g, or other
cttcattcatatcactggatttgtctgggagggaaactctggttcggatcaccggtggcatgaaggtgaaggctgaccgtgacgagtcgtcaccttacgctgctatgcttgctgctcaagacgtcgcacagcgctgcaaggagcttggcattactgcactgcacattaagcttcgcgccaccggaggcaacaagaccaagacccctggacctggtgcncagtctgccctcagggcgcttgctcgttccgggat

SEQ ID NO: 2896 - DNA, 253 bp, Zea mays
  misc_feature: Incyte ID No: 700161356H1
gcgacctcatgctcgtcggagacgtgccgttcgagatgttcgctagcacctgcaagaagctgaggatcatgaagagatctgaagccacaggcctggggtcgtcgtcagcgaggcagcaatgaagatgatcccatctgatcgagaggacctgcatgcccggcaacgttgaacaacatgtcgatcgaacgtcatggtggccttattaattgtttctttcttttcttttcttccttttgtttaattatttttgctg

SEQ ID NO: 2897 - DNA, 252 bp, Zea mays
  misc_feature: Incyte ID No: 700161357H1
caccgttcttatctgagacgtgcaagttctacagagattggcatgtcaagtctgatggcttccatggaattttccttcatgatcctgtgagcttcactgccgtgcttcatcccgagtacttcacattcaagaagggtgtggtgagagtggagacccagggcatttgcactggccacactttgatggatcagggattgaaaaagtggaattcagagaacccttggtcagggtataaaccgatttcagttgcat

SEQ ID NO: 2898 - DNA, 252 bp, Zea mays
  misc_feature: Incyte ID No: 700161359H1
gtgatccgaaccttcactttgttgaagctgttgctcttaagcctccggaagttaccatcgacatggctatgcagcagcagcatgaagctgagcttgctgcagcagctgcacaacctcttcctgatgacgatgatgatctgattgagtagaaaggatcatgagtcttgaacttgagcaggagttgtgccttgcgtgttttaagttgttctagggtgaactcttgagttctcattgtctggatcatctttttct

SEQ ID NO: 2899 - DNA, 251 bp, Zea mays
  misc_feature: Incyte ID No: 700161363H1
  unsure 130: a, t, c, g, or other
cgcctcaccccaactcgctcccttccccgtgcttcccgccgtcgtggagaggtcacgcggctggttcccgccgcttccggacgggttccgagggaggaggatcagctgccgcgatgttcctcaggatctntcgtctcggggcgcggcttctgcgcgagtctggagcggagacgagagctggaaatttgctaagcagtccaggcattttgtatcaagctcatcttaaccagcattcgaccagagtgcggaat

SEQ ID NO: 2900 - DNA, 121 bp, Zea mays
  misc_feature: Incyte ID No: 700161366H1
  unsure 15, 115: a, t, c, g, or other
agcttatggagcacntcaaacttttctccacccggctcaacattcctaagcttattcgagcttgtgacgaacagcagcactggaaagaacttacctacctgtacatacagtatgntgaatt

SEQ ID NO: 2901 - DNA, 153 bp, Zea mays
  misc_feature: Incyte ID No: 700161367H1
  unsure 47, 118: a, t, c, g, or other
ggcggccaactggcgcgacacgctcttctgcgaggcagcgccggcanccgccgcgggcggaggagctgccggtcgccgtcagcacgtgatgctggagtacggcggcgcggtgcgggangtggcggcgcgcgtgctggggctgctctcggaggc

SEQ ID NO: 2902 - DNA, 247 bp, Zea mays
  misc_feature: Incyte ID No: 700161369H1
ctccaacgcccttgatatgaagctcagggacgaccttgagaggctcaagaagatcaggaaccaccgtggtctgcgtcactactggggcctccgcgtccgtggccagcacaccaagactactggcaggcgtggaaagaccgttggtgtctccaagaagcgatgagctctatatcaccccgacaaatcttggcctcactaccgtgtcggtttgtgtccaaacagtcctgatgaagggtttctgtttagg

SEQ ID NO: 2903 - DNA, 76 bp, Zea mays
  misc_feature: Incyte ID No: 700161372H1
ggacttgttgtagacagcataggttgtaggtggtctgccccttctcaatcagacatgccatgagttcagaaaggat

SEQ ID NO: 2904 - DNA, 188 bp, Zea mays
  misc_feature: Incyte ID No: 700161375H1
  unsure 114, 158, 177: a, t, c, g, or other
ggctgtcgaagcgcacagcctcctcttattagctggagggcacaagcaattcaccagcgcgggatggccttggacgaccggcgacgaagctagatgcgcgacggcgcgactganccaccagcaggcgttccagctccagcaggcctcgtgtgtgggcngcgtgggcctgccgctggnggctccgatct

SEQ ID NO: 2905 - DNA, 245 bp, Zea mays
  misc_feature: Incyte ID No: 700161376H1
agaatttcttatttataacggacaacaaccactatttggctcgaccgaccctccttgggctggccggtttgcctcttagcccgcctagccaacatgggccaccaacgcctttttggaccgcccctgcctccacgagcctactttggctagttatcccttggtcatggccatggctggccactggccgttgttggctggtcgcagcttgacattactggccacgactaactagccaaatttttctc

SEQ ID NO: 2906 - DNA, 246 bp, Zea mays
  misc_feature: Incyte ID No: 700161377H1
  unsure 232: a, t, c, g, or other
cagaagcgccgtgctgctgggcctgcctctctgaaagcgcctaagatggacgttgaggaggagaagccgatcatcaagctcgcagtgaacaatatgaccaactcaaacgcatatcactaccctgccgtcgtcggccacaacatcatacccgagccattcatgcagactcagaacatgccattcgctcctctggtgaattatgctgccctagtgaacctgtcttcagaccaangcagcaactcgttc

SEQ ID NO: 2907 - DNA, 245 bp, Zea mays
  misc_feature: Incyte ID No: 700161378H1
cattcaagggccacgatgtttctcatatgtaataatgcagcacaaggcattctatcttcattcttcttcaagtatgcagacacaattttgaagaagtattcgtcaactgttgccacgatatttactggcctagcttctgctgcatttttggggcataccttgaccattaattttctcctgggcatatcagtggtgtttatttcaatgcaccagttcttctctccacttgctaaagtcaaagatga

SEQ ID NO: 2908 - DNA, 225 bp, Zea mays
  misc_feature: Incyte ID No: 700161380H1
agatgacctgatcaatctctccttttgtaataattacaataattaccctgcatgtacgtacgtacggccggcgatgggatgacctgctcccggtaaggtaacatcgcatcgcatgcaatgcaagtacgtgttgtgttaactacagcagttaattagcgcgatggagtagtgaactagtgacatactgtactagataggcgcggcgtacactgtactgtatatgtt

SEQ ID NO: 2909 - DNA, 153 bp, Zea mays
  misc_feature: Incyte ID No: 700161381H1
accctccaaccgctggatcgggtatcggcattactgggcgcacgagactagggatttcccccttgcaatcacgaatccatggcggatgctgaacctgttgatcagaagaattaccttgaggaacgttgcaagccgcaatgtgtaaaaacattg

SEQ ID NO: 2910 - DNA, 243 bp, Zea mays
  misc_feature: Incyte ID No: 700161382H1
  unsure 209, 217, 224, 226, 239-240: a, t, c, g, or other
gattgttctatcctcttctctgttctcacccccttgcaagcaacaatcgttcaccgatcgatccagtgcgtcctgcatggaaactgccgccgtcgccgcctccagtgccgggcgccgcatcatggtggccgtggacgagggcgaggagagcctgcacgcgctcaactggtgcctcgccaacgtcgtctccccggcaggaggcgacacgntggtgctngtccacncncgcagcacgcgcnnggt

SEQ ID NO: 2911 - DNA, 241 bp, Zea mays
  misc_feature: Incyte ID No: 700161383H1
  unsure 79-107: a, t, c, g, or other
gtttggtggacgccttgcttttcacttcaccggaaaccaaaatggcagccagcaggatccctccttgccatcttcaccnnnnnnnnnnnnnnnnnnnnnnnnnnnnnatggccacgatctgcccaaggccaggcacaaggcagtcgtcggccttcaggttcagggcctctgctcatgggagcggttcctcaccaaacctctcctccttcactgctgtgacaggcaagaaggttaaggtgtt

SEQ ID NO: 2912 - DNA, 242 bp, Zea mays
  misc_feature: Incyte ID No: 700161384H1
  unsure 2, 89, 94: a, t, c, g, or other
angcgtgcgccacgtcgctggaatccatggtggactttgccaccgccagcctcgggaccagccacgtgagggccgcgtcgacggtcgtnggganggagggctcgccgaggcaggagtacaccgtgacaggcgtgaagcgggcgggcagcgggcgcctggtggcctgccacgcggagccgtacgcgtacgccgtgttcgcgtgccacttgacgcagcagacgcgggcgtactcggtgtcgatg

SEQ ID NO: 2913 - DNA, 105 bp, Zea mays
  misc_feature: Incyte ID No: 700161385H1
agcaaagtctcggtttccttaaactgtgccagttcctttggcatatggatgttttgagatgcaaagttgaattgtttcatttatcggggaataattctaaattct

SEQ ID NO: 2914 - DNA, 241 bp, Zea mays
  misc_feature: Incyte ID No: 700161386H1
  unsure 199: a, t, c, g, or other
tcttgctaccggctggcggcttcttcttccgttcctccccaagtcctcttcccggaggaatcatgatcgtctgcgtcgccgttgtcggccaccagaacaatccgctgtacctgcagagcttcacggaggcggacgacgccctcaagctcaaccacatcgtccactgctctctcgacgtcatcgacgagcgagtgagcantcctaagaggagtgcacctacattgaatgagacatttttggg

SEQ ID NO: 2915 - DNA, 243 bp, Zea mays
  misc_feature: Incyte ID No: 700161387H1
gttctgactagccacatccagtcaagcagtaaaggcgcaccatggaggcggcggcggagaataaggaggccgagcaggaggagcagcagctaccgcacgcgcagaaggataacgcgcccgccgccgccgaggaagacgaagcggattcggaggagaccgagcgccgcaaccgcgacctcaagtccggccttcacccccttaggcacaaactcgtgctctggtacactcgccggacgcctggag

SEQ ID NO: 2916 - DNA, 241 bp, Zea mays
  misc_feature: Incyte ID No: 700161388H1
cttaattattgccaggacaggagaaacaaacaaagatgaggcctcagctgatactcgtcggcactctggctgttctcgccatcctcgcagctctcggcgaaggtgaccacgcgaatcctctcctcgccgttgttttgtttaattttcatcacatacaagtcaattattatacatatatgcaaaactactagtgattttttgactaaccaagcgtcggcatcaggctcgtcgtcctggccgt

SEQ ID NO: 2917 - DNA, 240 bp, Zea mays
  misc_feature: Incyte ID No: 700161389H1
acaggctcttgcagccataccttcaatagatagtgaagcagtccaacagcgattggatcgcgttcgaacattctatgagttgttaaatttgccttttgagtctttgcttggattcatcgcagaacatgaatatttgttttctgctaaagaatacctgagtgttctaaaggtcaatgtgccgggtagagaaatacctgcggatgctgaacgacgcatctcacagattttgggtcactagat

SEQ ID NO: 2918 - DNA, 241 bp, Zea mays
  misc_feature: Incyte ID No: 700161390H1
aatctatccaagcaacaaacttggcattcttgcctgttcttaattattgccaggacaggagaaacaaagatgaggcctcagctgatactcgtcggcactctggctgttctcgccatcctcgcagctctcggcgaaggctcgtcgtcctggccctgctgcaacaactgcggtgcttgcaacaagaagcagccgccggagtgccagtgcaatgacgtgtcggtcaacgggtgccatccggagt

SEQ ID NO: 2919 - DNA, 143 bp, Zea mays
  misc_feature: Incyte ID No: 700161391H1
atcatggatttcaaggcacacttgaagagcaaggctggtttatctgattagagggctttttccagcaaccatgagctttttaactctgtatcacgaagtcccagttttccaatagcgaactatcagagttactttattgtatc

SEQ ID NO: 2920 - DNA, 238 bp, Zea mays
  misc_feature: Incyte ID No: 700161393H1
gtcaggatttttccagacaagcttctactttggttacaccttgatgttctgtcttggattgggaatactttgcggtgctgttggatatttgggctccaccctatttgtgaggaggatctacagaaatatcaaatgcgactaaacttggtctaggctgctagcatgtcttgtcacaatatggtgcagagtaataccttgagcttctgattgacttcggaaattacacaggaggttgctc

SEQ ID NO: 2921 - DNA, 71 bp, Zea mays
  misc_feature: Incyte ID No: 700161396H1
  unsure 10, 16, 26, 28, 49, 63-64, 70: a, t, c, g, or other
gggggcttantacacncttcttatcntnttcaaggatgctagccacgtntttgccacatccannaagccnc

SEQ ID NO: 2922 - DNA, 246 bp, Zea mays
  misc_feature: Incyte ID No: 700161402H1
gttatcaacggatcagacaggacatggagtctcagatagctgatgtgatgagaaagcaacttaaatccaaggaaagtagtggtaacacagataactctgtgaaactgcaacatgcagaatcaaaattatcagatcttcgaactacactggcagcgttaggaagagaagcaactgcagctatggaggctgtagaggctcagcaacagcaagttacgtatgaacgtctccttgcatgtctatgcttac

SEQ ID NO: 2923 - DNA, 246 bp, Zea mays
  misc_feature: Incyte ID No: 700161403H1
  unsure 187: a, t, c, g, or other
agaatttgttattttctgggattgaattaaaatggttcttggtgaaggtggatggttcagagagattagaagaaggtactgaccaagcatctcaaataagccaatttcttgagggatacagagcaggaagaacaacaaagaagaaaattagcggcccttctttcatgggtttcctgaattctctggncagcttgacctcgctgtacatccttatattcgtcattgcccttctgtttgtcatggtgg

SEQ ID NO: 2924 - DNA, 100 bp, Zea mays
  misc_feature: Incyte ID No: 700161404H1
ccgatatctttctttctttttccccccttttcgactctgtactgaaactgctgagagattcgcagtattgttgtatcgtattcatatgctactgttaaaa

SEQ ID NO: 2925 - DNA, 243 bp, Zea mays
  misc_feature: Incyte ID No: 700161405H1
  unsure 160: a, t, c, g, or other
agccagcatattcaacaagacgcaggaacacttccctactctgaaagactacaacgattatctggaagaagttgaggatatgactttcaacctgatcgaagggatagatgtcgaggagattgaagcaaaaattgcaagataccaacaggaaaatgcgganagatatacttgtccagagctaaaagggcggaagatcttgcggcacacttaaagcaagcaggatgaaccctgtaaaggccgaag

SEQ ID NO: 2926 - DNA, 244 bp, Zea mays
  misc_feature: Incyte ID No: 700161406H1
  unsure 60-94, 106, 120, 204, 206, 221, 224-225, 227, 231: a, t, c, g, or other
ggacactacacagcgcgctactgacatgtcgatgctcaccagcatactgggccgcaagcnnnnnnnnnnnnnnnnnnnnnnnnnnnnnnnnnnnggcggcggcgcncgcactggcaccgncgccggcgccggcacggaggcggcggcagtggagccggtgagcatcgacatcgcggagcaggggccgctagtggacgccatcangntggcggtttcgcggngtnngngctngtcctgccaccgt

SEQ ID NO: 2927 - DNA, 244 bp, Zea mays
  misc_feature: Incyte ID No: 700161408H1
  unsure 225: a, t, c, g, or other
cagaaccagaaccaagcagctcgttgcaacctcatatcatcccctgccacgcacctccgtccgccgcgccatggaatcgaggaggagggccgtgcccaccgtgacggcggttgcggtggcgacgctgctgctgacgatgatgacgtcgtcgggcgtgggcggcgacttcgcggcggaccgggcggagtgctcggagcagttggcggggctggcgacgtgcctgangtacgtgcaggagcaggcg

SEQ ID NO: 2928 - DNA, 244 bp, Zea mays
  misc_feature: Incyte ID No: 700161409H1
gccctcgcttggtgctcagttctttcctctgctcctccgcctcttctcgcacctcggcaccttcttcggcaactgcgagcgagatggaggcgcaagacgactgcaagtggcggcagatcccggcgttcggcgactggaacgtgtgggacggcgacatgcccgtcacccagtacttccaggcaggggccttcttcttcgcggcgccggcggagaagggcgacgcggatctcttcaaggtgcccca

SEQ ID NO: 2929 - DNA, 242 bp, Zea mays
  misc_feature: Incyte ID No: 700161410H1
aaaattgaaatgctttgctcaaagataggctgcccggctgaatcaaatcctgcatggagatggcattactatcaaccatggaaggattctgctttgcagcgcacggggatggagcgactggaagaagagcaggcctgccgaagcctcctggtcctattttccagtgccttcagtggctgctgtcagagttcccggtgttgtccctagatgatgttgagaatctggccttttccagtgggaaa

SEQ ID NO: 2930 - DNA, 245 bp, Zea mays
  misc_feature: Incyte ID No: 700161411H1
  unsure 87: a, t, c, g, or other
ggtcaccgtcacctctgacggacccttctccaagaggtacctgaagtacttgaccaagaagtacttgaagaagcacaacgtgcgggnattggctacgcgtggttgctgccaacaaggaccgaaacgtctatgagctccgctacttcaacattgctgagaacgagggcgaggaagaagattagattgcactacgcttatattttagtattgaactcgttgcattttgatacctgtacccgtagttt

SEQ ID NO: 2931 - DNA, 155 bp, Zea mays
  misc_feature: Incyte ID No: 700161413H1
ggaatgggttatgagtgatgctgaacttgttaagtcttttggtatatttgtacggctctccaatgatattgtatcaaccaagcgtgaacaaagagagaagcattgtgtctccactgttcagtgttacatgaagcagcatgaactaacaatggatg

SEQ ID NO: 2932 - DNA, 245 bp, Zea mays
  misc_feature: Incyte ID No: 700161414H1
  unsure 167: a, t, c, g, or other
agaggcttggcttgaagaatataaccaggacccaaagaggtacagtgctggaaggggtgctcatataaaccttaaacgggcagaaaaggcacggattttggttagaaaaatcccaagtatggtggacgacttgataaaccgaacctttgcttgggaaaacgcaaganataaaccctttctctatgatgggcctcttgatttgcgtgcgcttttgatagggacgcctaatatctgtactagaagag

SEQ ID NO: 2933 - DNA, 99 bp, Zea mays
  misc_feature: Incyte ID No: 700161415H1
cattttaattccataaattaacattataatgatgacgtatgaataattaacccatagaaattgttgggaccatggcttcgtcgccgaaggtactggcag

SEQ ID NO: 2934 - DNA, 247 bp, Zea mays
  misc_feature: Incyte ID No: 700161416H1
  unsure 47: a, t, c, g, or other
gaaggagggtgcactggctgaagagaacatgcgcgggatttgcttcnaggtctgtgatgtcgttcttcatgctgatgctatccacaggggtggtggccaggtcattccaactgccaggagggtcatttatgcttctcagctcacagccaagccgaggctgctggaaccagtttacctggtggagatccaggccccagaaaatgcatgggtggcatatacgtgttctgacccaaaagagatgacatgt

SEQ ID NO: 2935 - DNA, 151 bp, Zea mays
  misc_feature: Incyte ID No: 700161417H1
accagagcggcagagccttcccctccgctccccagtcccacccgcaccctagccctcagcaaaccctaaccgctcgtcgccatgaaggacacctcgttcaaggccaccggcgccaagcgcaagaaggtcggcggcgccaagcgcgggctca

SEQ ID NO: 2936 - DNA, 239 bp, Zea mays
  misc_feature: Incyte ID No: 700161418H1
acagatcatcacagtgaattgactgatattggtatcattccctccttgaaggggtccgtaccgggtccaaaatttccatatgttatcttctgtgctcctccatatcgttctgaggattatgctggagatctgagagtagcagcttcaaattggaatggaaaaggctctttcctattcacctcgagtactgctgtgtatgactgcagtgacaatggattctgcagtgaggattctccttg

SEQ ID NO: 2937 - DNA, 235 bp, Zea mays
  misc_feature: Incyte ID No: 700161419H1
  unsure 210: a, t, c, g, or other
cccgtctacgaccgcttcggcggcctgccgctcgacgtcctcgccttcgtcgaccgcaaggtggacgacacggtgcacgaggtggacaagcacctcccgggcgcgctgaaggcggcgtcggcgcatgtctacgcggtggttcggggcgtgccggaggtggcgcgcgactggcggccgaggcgcacggtcgggcgtgaggggcgcaccgtngcggcgctcgcgatgacggagccgg

SEQ ID NO: 2938 - DNA, 239 bp, Zea mays
  misc_feature: Incyte ID No: 700161420H1
cttcgagggccacctcgggcgggaggccgaaccagattcggcgacgccgcagggcacgagggtgccagcgtcaacgaggaggacctcatccagccgccgcggggcgcgcgcactgtggacggtctgcggctcaacgtccgcgtgggcgtgcagtacctcgcggcgtggctggccggctccggctccgtcccgctgtacaacctgatggaggacgcggctacggcggagatcagccgcgt

SEQ ID NO: 2939 - DNA, 148 bp, Zea mays
  misc_feature: Incyte ID No: 700161421H1
cgcttgatcgcaacagctcgatcaatggcttcttcctggggttctcggttgccgctcgcagtagtgctgctgctcgtggcctgcttctcctccacggcagccgccacaagctacaccgtcggcgacgggtccggctggacaaccggcg

SEQ ID NO: 2940 - DNA, 237 bp, Zea mays
  misc_feature: Incyte ID No: 700161424H1
attaccatcgagcttgaatttgtacaatcaacttcagggacttggtttccatgttatcctattgactggccggagtgaattccaacgtaatgccacagaattgaatcttttgtttgctggctacaactcatgggaaaaactcatactgaggcaaccttatgatattggcaagaacgctgtgcagtacaaatcagagagacgagcagcaatggaagcggaaggtttcaagatacttgg

SEQ ID NO: 2941 - DNA, 190 bp, Zea mays
  misc_feature: Incyte ID No: 700161430H1
ctaggccatatgtattcggtagtgttttctgttaacatgataggtgtctgatgtctaaataatggaacgagtccttttgttgagtttgagttgtggaactttcaaagcgtgcgttgcatgctggcgcttgtgccggcaaacatggcatactttcatgttatattgttatttgctagtacctgtgtgcctt

SEQ ID NO: 2942 - DNA, 241 bp, Zea mays
  misc_feature: Incyte ID No: 700161431H1
  unsure 236: a, t, c, g, or other
cgccgaaatcccgttgcgtctctcgcgcgttaccaagctctcaagttttctcgcgccgacggcaatggatgaggtcaccgaggccgtgaacaacctcaacatctcgggcgtaggggccgcgggcgttgccggggcggaagggcacaagaagaatcgcatccaggtctccaacactaagaagcccctcttcttctatgtcaacctcgccaagaggtacatgcagctgcacaacgaantagag

SEQ ID NO: 2943 - DNA, 243 bp, Zea mays
  misc_feature: Incyte ID No: 700161432H1
  unsure 233, 236, 239: a, t, c, g, or other
cacaaggctaggcacaagcgaaccaaagccatggcgtccgacggcagcggcgtggtgacggtgtacggcagcaacggcgcggactgctggagccgtccaagcagcccaagtcggcgactttctccgtcaaggtggggctggcgcagatgctccgtggcggggtcatcatggacgtggtgaccccggagcaggcgcgcctcgcggaggaggccggcgcgtgcgccgtgatggcnctngancggg

SEQ ID NO: 2944 - DNA, 221 bp, Zea mays
  misc_feature: Incyte ID No: 700161435H1
  unsure 82: a, t, c, g, or other
aggcacggctacgcgggggccaagtacctccccgccatccccaccgaacgcatcgccaaggtattttcgtcggcgccggagncgagccgctggcagagggccagtagtgtgtgtgtgcgcgcgcgcgagctcgtctttgccggtggtgactctggatttggaccaccttccgaactgaactgaaaataaggaagcgtgaatccgggggccagctaaagatg

SEQ ID NO: 2945 - DNA, 232 bp, Zea mays
  misc_feature: Incyte ID No: 700161436H1
  unsure 49: a, t, c, g, or other
gaacgaggaaggtgatgataagaaagaggaggagccccctgcagagaanactgttgagaaagaggtggtccctgctgtagatgcagcagagaatactgaacaaagcaccggtgggcaagcacagcctaatgatgttggtgccccagaatctgagaataaaggagacggcaagccagctgaatccgaattagctcccactgcatttgttgatgaagcagtgccccttgtaatc

SEQ ID NO: 2946 - DNA, 154 bp, Zea mays
  misc_feature: Incyte ID No: 700161437H1
  unsure 25: a, t, c, g, or other
ggatgatccagacctggtacctcgncggcgactccgcggtgtcccccagcaccgtacgcagcctggccaaccgtttcgccgcgctgctcgccgtcgccgcgtgatttataccggtcggcgggccggttggtcgagttgcgttggatttgagttc

SEQ ID NO: 2947 - DNA, 232 bp, Zea mays
  misc_feature: Incyte ID No: 700161438H1
cctacagtcgcgacgccattccgtgaacctcgttattcattgggtggtgaaacaccaatgcacccgtctcgaacaccgcatcatgcttatcagactccaatgcgggaccctggagcaacaccaatacatgatggaatgcggactcccatgcgaagtcgagcctgggctcctatgagtcctccaagggacaattgggaagatggaaatcctgctacttggggtagcagtccag

SEQ ID NO: 2948 - DNA, 121 bp, Zea mays
  misc_feature: Incyte ID No: 700161439H1
  unsure 56, 68, 101: a, t, c, g, or other
cgaccgtcgtggcgaccgaggaagcgccggtggtggagaccccggctccgcccgcngtcgtgcccgangaggctgcccccgccgccgaggccaaggtggangagccagctgccccggcgga

SEQ ID NO: 2949 - DNA, 233 bp, Zea mays
  misc_feature: Incyte ID No: 700161440H1
atgctggacggagaaactgagtcttctctcgagctgctggatctctgcaacaccatgcaggagatcttcgttgagttgaaggccattatccaagagctgcaagtggctctaagaaaaggggatggtgcaaccgtccaagccaagatccagtcttacagccgcttggtgaagaaggctaagcagtctttcaagaagtcaagcaagaaggccgtttctgacaagacagactgtgc

SEQ ID NO: 2950 - DNA, 160 bp, Zea mays
  misc_feature: Incyte ID No: 700161441H1
cgtccggggagaacgccgagaagttcctgccggaggtgcctgggctggaggcgttccccggccaggtgatgcacgcagtggagtaccggtcggccgaggggatgcgcgggaaggccgtgctcgtcgtggggtcgggcaactccggcatggagatcgccta

SEQ ID NO: 2951 - DNA, 143 bp, Zea mays
  misc_feature: Incyte ID No: 700161442H1
gtttgtgatgaccacagccaccaagttcaccacaccatagccagaacattctagggagttgctggcctgtatgaagcttgttccgtaatcatctcagagctcctagcagaaggagtgtaaattaaagatgaagtggtcgtgga

SEQ ID NO: 2952 - DNA, 231 bp, Zea mays
  misc_feature: Incyte ID No: 700161443H1
  unsure 228: a, t, c, g, or other
ggagcagcatccacaaccacaagccatggcggggaggaccaacatccccactaacaactccgccctcatcgcaatcatcgccgacgaggacaccgtcactggcttcttgatggccggcgttggcaatgttgatctgcgcaagaaaaccaattacctcctcgtcgacaacaagacgacagttaaacaaatcgaggacgcgttcaaagaatttacttacaagggaggttntgg

SEQ ID NO: 2953 - DNA, 187 bp, Zea mays
  misc_feature: Incyte ID No: 700161444H1
  unsure 117: a, t, c, g, or other
cttccgcttcctctcgctccctctgctctctcgcggtcgcagtctcgcagatcccgatcgcgcaaggagccagcgtagagggtgatcgacgatggcgggcagcacgcgcgcagcacnaaggcgttcctgctctgcaactacacgctgctgggtgcagcatcggcgtgcatcttcctcacgctctcgc

SEQ ID NO: 2954 - DNA, 232 bp, Zea mays
  misc_feature: Incyte ID No: 700161445H1
cgtccacctcgtctggtctctagtgaggcggtttgatcaaccacagcttttcaagccctttgtgagccggtgtgaaatgaagggcaacattgagattggcagtgtcagggaggttaatgtaaagtctggtctgccagccacaagaagcacggagaggctggaactgttagatgacaatgagcacatactcagcgtcagatttgttggaggtgatcacaggctgcagaactac

SEQ ID NO: 2955 - DNA, 237 bp, Zea mays
  misc_feature: Incyte ID No: 700161447H1
aaggatctcatcagcaagcttttgtgtaacgttgagcagagacttggcacaaaaggagcccatgaaataaaagcacatccatggtttagaggtgttcagtgggagaagttgtatcagatgaaagctgctttcataccagaagttaatggagaattggatactcagaattttgagaaatttgaggagactggaacacaaattcaaagttcatccaagtcaggcccatggagaaagatg

SEQ ID NO: 2956 - DNA, 238 bp, Zea mays
  misc_feature: Incyte ID No: 700161448H1
gcctcttaacatgttcggcttgggtatcggtgggggttgtggatttggtcttggactaggatggggctttggaaatgcttttggttgtcagtatcgatcttcaagagttcagttccaaggcattgaatttcagaagaaggcggaaggagatgatgcaccaaaagttgtttcaccggagcttgctcaaaagtctcgtccttatggctagtatgcctgctaccataaaaattcagagact

SEQ ID NO: 2957 - DNA, 117 bp, Zea mays
  misc_feature: Incyte ID No: 700161449H1
  unsure 26, 60, 106: a, t, c, g, or other
gctgagattacatcatcgctactganatcagttgaaagtggcgatctcattgcgtatggnctaatcccagagtttgttggtagatttccaattcttgttggtctancctccctcagc

SEQ ID NO: 2958 - DNA, 95 bp, Zea mays
  misc_feature: Incyte ID No: 700161450H1
  unsure 73, 75: a, t, c, g, or other
gcacgcggggagcgacaagttcgtgcgtgtggcacgcgctggacttcgccgacggcgagcctcaaagaggaanangtttgctatccgttttggat

SEQ ID NO: 2959 - DNA, 216 bp, Zea mays
  misc_feature: Incyte ID No: 700161453H1
gatggttacgctagtacagatgctagtggtgctgcattctgccgttcagctgcgcttattttaatggcactgttgcttctaaggcatgcattgtctatgtcagacaacgaaggaaacgatgatgacgcttctaccatattctcgctttttctgcttcgagctgctgggtttctgctgccgtgctacatcatggcatggatattcagtatttgcacg

SEQ ID NO: 2960 - DNA, 197 bp, Zea mays
  misc_feature: Incyte ID No: 700161454H1
tgaagatgcttatgatctaagctagattgtatcctcatgttaattctgctgaatcggaggacaaaccttacatttatggtgctggcaagtcccagtggcgtgccatgaaaatttacgttccgtcttttaactgggtatccgagtgtcgtgctcagcatattatggatattatttccgtaatgcttcctttggtcgcc

SEQ ID NO: 2961 - DNA, 256 bp, Zea mays
  misc_feature: Incyte ID No: 700161455H1
gtcagaaccagcgtaatagtattcaaatgggaacccattctggttttcggaagtctaaaagttgcttatgttggtccccgaagtgtagaggttcctttggctaataaccagccctataaggaatatattggatcataatactccatttcaaagttacacctaagatatctgctggtcgacttttatattcagctcccaaaaatctgtcacaagtttgtgagagcaactgaattgtctttaccagcagaagcagccc

SEQ ID NO: 2962 - DNA, 257 bp, Zea mays
  misc_feature: Incyte ID No: 700161456H1
caaatattcagagttctgcttgtggttaccaagagccattgtacgatgtagaggaacttcgctccattgcaccagctgatgtgaaacagtccttcgacattcgttcaataatagcccgtattgttgatggaagtgaatttgatgagttcaaaaaattgtatggaacaacactagtgactggttttgcaaggatatgtgggcaaccagttggaattattggaaacaatggcattttgtttacagagtcagcgttgaag

SEQ ID NO: 2963 - DNA, 257 bp, Zea mays
  misc_feature: Incyte ID No: 700161457H1
agtagttggcacagaaaacagaggtctctctgctgatacacttggttctttaccttcagtaacatacaagctgcaacatgttcaggatggcaacacagagcaatgcgtaatttgccgtgtggaattggaggagggtgaatctttgattgcactcccctgcaagcacttataccatcctgaatgcataaaccagtggctgcaaataaataaggtatgccctatgtgcagcgcagaagtatcaacctcgggtaacaagg

SEQ ID NO: 2964 - DNA, 257 bp, Zea mays
  misc_feature: Incyte ID No: 700161458H1
gggaggtgaagagctacttcaacaagtccgccggacgggcggcgagcaacaacagccacgggcacgccggcggcggcaagaagggcggcggcggcgggaagcacggcaagaacgagggcaacggcggcgcggtggcggccacggacaagcggttcaagacgctgccggcgtcggaggcgctgccgcggggcgaggccatcggcggctacatcttcgtctgcaacaacgacaccatggacgagaacctcaggagggag

SEQ ID NO: 2965 - DNA, 258 bp, Zea mays
  misc_feature: Incyte ID No: 700161459H1
  unsure 6, 47, 156: a, t, c, g, or other
gaaganagtctggggtcacttcctacagaaaataaggtggatgacantcccacctttgttgaacaagaaaaacatgaagttaaatgctctgaagaaacacaggaaatggtcgaagaacaaagtgatgatcagctgcacacagaaagatcaattganattgatgaggatatcaaaaagaacactcgtgctttagaaataccagcataccaagacaatccccaggatggaatttctggtgaattgcagacagaagaagca

SEQ ID NO: 2966 - DNA, 257 bp, Zea mays
  misc_feature: Incyte ID No: 700161460H1
  unsure 41-42: a, t, c, g, or other
ctcgtcaccactcaccattgccgacgcaagctgcgactganncctccgtggcgacggaggagacggccatggtggcagcgatggagctcgagatcctaggcatgaatttcgggtgcgtcctcgcggctctgtccgacgccaagatccccgacaagggctgcctgctcccgctcatctctaagctgctcggctacgccatcgtcgccgcatccaccaccgtgaagttccccagatactgaaaattttgaagcatggaa

SEQ ID NO: 2967 - DNA, 258 bp, Zea mays
  misc_feature: Incyte ID No: 700161462H1
  unsure 46: a, t, c, g, or other
attcgccatcgcaatcccttgcactctcaagacctgtctgcaagcncagccccaaagtcaaacagctgaactcgtcagcaattactgatttttgcagagaatgcttgcataactttgttaaagaagctgtcagtttggcattgtctggcgggcagatggatcaaactggtaccccctgttagattgtagacaaatttgggattctttcttgtcttatcattgtgaatatctcaaagcacaaactagggacaagttgtt

SEQ ID NO: 2968 - DNA, 220 bp, Zea mays
  misc_feature: Incyte ID No: 700161463H1
  unsure 216: a, t, c, g, or other
gacaccctaaatttttgttgtcagtagtaagctatctacatgattctgcagattaataataacaaagattgctcaaaaaactacaagataaagctgattttaagcttcgtttgatcttgtatcatcagcatattcactatcttgggcttcatctaagttagcctcaatatccgtatctgaaccgacttctgaagctttggctttggtgggaaggangcac

SEQ ID NO: 2969 - DNA, 181 bp, Zea mays
  misc_feature: Incyte ID No: 700161465H1
cccaatcaaactgattgatccgtcgcccgcaaggcaacagcagccgcggcgaggtcgtccgtcggattcggaggctcagttattactgaaaagataatacagtacctatggcttctctggacgccgtgcgaggagacctcgccctgctgattctgtacctgaacaaggccgaggcgcggga

SEQ ID NO: 2970 - DNA, 121 bp, Zea mays
  misc_feature: Incyte ID No: 700161467H1
  unsure 2, 27: a, t, c, g, or other
anaattagcagatgaggagagagaganaggcaatgagttcttcaaggagcaaaatacccagaagcaataaaacactacacggaggctctcaagagaaacccaaaggatcctagggtttaca

SEQ ID NO: 2971 - DNA, 247 bp, Zea mays
  misc_feature: Incyte ID No: 700161468H1
  unsure 194: a, t, c, g, or other
gcggcgagctcgcgctgccgcacgatgggcaggagcgggcggtcggcgatgtcctcctgcagggtggcgagccgatccgaaagggcgttctcctggtgcaccgtccggctgtggaggtcgttgatgagcaccagctgcgcggacgtgatccccagggccccggtcgggatgacgccgttgctgaggccgccgancagctcctccactgcgcctccaggccctccccggagaagttgtagagcaggcg

SEQ ID NO: 2972 - DNA, 178 bp, Zea mays
  misc_feature: Incyte ID No: 700161470H1
  unsure 85, 151: a, t, c, g, or other
cacgcggcacgtgcgggcgctccacggcctcggggcgcggcggttcgggatcgtggacgtgccgcccctctgctgcgtgccgtangtgcgggccgcctcccccgacggcgcgtccaggtgcgtcgacggcgccaacgcgctggcgaggganttcaacgacgcgctcagggcggcgtcg

SEQ ID NO: 2973 - DNA, 250 bp, Zea mays
  misc_feature: Incyte ID No: 700161471H1
  unsure 119: a, t, c, g, or other
gatccaaccacctggtgacccgggcgagccagccatctccgtttccttgccagtcccgcgagcaccattcaccacaccagcgcaccgccatggccgacgtcgagaaggccacccccgtngccgcaccggccgagggcgcgggcggcgacgtggccgccgggagaaccggcgcggtgggcgccctgctgcggcggtggcggacccaggacctgctggaccggtcggggtccgcgctgcgcgccgcggcgtg

SEQ ID NO: 2974 - DNA, 249 bp, Zea mays
  misc_feature: Incyte ID No: 700161473H1
ctgtgttcttcagtactaccgctaccacatttgcgatcctgagttgtgattaccggtcctttaggtgatgcacaaatggtactcgtgaatattctttttattagcagttttctgcagggcctgtacattctctttctgctcgatccgattgcattgcagattgatttgtaaatgagtacatggtcacgttgaaccttgaaagcagtcaatcattcaaaaatggtttatgaattggaagctagtataaag

SEQ ID NO: 2975 - DNA, 156 bp, Zea mays
  misc_feature: Incyte ID No: 700161474H1
  unsure 39, 48: a, t, c, g, or other
atcaaataggtatccatagctcagcatagcccgttttanatacttcangcactaaggcttccagggattgaagccttagtgcctgaagtatcaaataggtggccctgatgatagtctgcctcataacatcattgcttggttaagagttgtatctgc

SEQ ID NO: 2976 - DNA, 250 bp, Zea mays
  misc_feature: Incyte ID No: 700161475H1
  unsure 158: a, t, c, g, or other
ggcagcagcccagcacgtgcctctctacgcctccacctccctcgattcgttccgagcccatcgcctccgcctcttcgtcaccgtcgaggtcgcaccacatggcggcgctcctagcccggcaggcagcgcaggcgctccgcgcgagacagtcggcgcantcgggccgacaacgtcggcgatgcaggggcacctccgtacctacatgaacgcggggattcccaagcggttcaaagaggaagaggagaaagaa

SEQ ID NO: 2977 - DNA, 251 bp, Zea mays
  misc_feature: Incyte ID No: 700161476H1
gacgcatcgaggttagcacgcgaagaagcgaccatgagggccaagtggaagaagaagcgcatgaggaggctcaagaggaagcgcagaaagatgaggcagagatccaagtaggcagatcgagatggattgtggacctgatgacatgcgtgggtacatacatttcttcggatgcgttggtgtgcctgtggagagatgtcaacctgccatggtgtcacggtccgccatcagttgaacgtcttgcctgcacttca

SEQ ID NO: 2978 - DNA, 249 bp, Zea mays
  misc_feature: Incyte ID No: 700161477H1
cacaagcaaactaaaacacagcggctaaaggcacagctctccagcattcatccagaaagaagagaaggaaccaagccaacagccaaccatgatcagcgccaagagggtcgctcatctggctaagaagtggcagaggatggctgcccaagggaggcagcgcctcacctggggcggcgcaggcgcggcagcaaagcaagccggcgagagtgcagtccgtggcgagcaagggccatgcgccgtgtacacggc

SEQ ID NO: 2979 - DNA, 227 bp, Zea mays
  misc_feature: Incyte ID No: 700161478H1
cccgaggatgctgcggctgcgctggcgtgccgtcctccccccactcccactccctccgctgcctggcttgcttcgccgcctgcctccgcaccggcgcgccctctcgtcctcttccggctctatcccgcttccaccgccggtgatggaggcttcctacaagtttgggccctacaaaatcgacgccagggaggtcttccacgccacgcccctctcctacgccatggtga

SEQ ID NO: 2980 - DNA, 255 bp, Zea mays
  misc_feature: Incyte ID No: 700161480H1
  unsure 54: a, t, c, g, or other
attttgtcttaatgaccagtatggatttgctttccctttccgcaaaagactcgnatgtggctttttataacttttgcactgcagcatgagagcatcaactagtcaaaatcctcacagtggttttctacttttctcacaaatcacaagcttgcttgcatgatctatggtactagtttcatatgtttttagcactgcactatataggtgctagggcatagcaaagagaataggctgccaatgccttaagttgtcatc

SEQ ID NO: 2981 - DNA, 174 bp, Zea mays
  misc_feature: Incyte ID No: 700161481H1
  unsure 62-63: a, t, c, g, or other
gctgcgtcagacagagaaagccgagattagcggcggcggcgatggcactcccggcgtcgagnnccggcctcttccgcttcgtatccccccgcagccgtccccagtccactgacatcgtggccgctgcctcctggggagtcttcgccggcaccgccggcctctacctcgtccagc

SEQ ID NO: 2982 - DNA, 79 bp, Zea mays
  misc_feature: Incyte ID No: 700161482H1
  unsure 45, 53, 60, 69: a, t, c, g, or other
gtccgcaggagtcccgagccccctcctatgatcattgcgctggangacgaggnggtcgancaagggtangggtacggcg

SEQ ID NO: 2983 - DNA, 242 bp, Zea mays
  misc_feature: Incyte ID No: 700161483H1
atgtgactcagagcatgattggggggaaaattctggaaagccaacttcaacgtataggagttcttagtgctggtgatacaataagcaaacatccagcctttgatacaaactacaaaattttgtgggccaatcatggagatgcaataagcattcagtactctggaactcctgctctgaagggagattttgttcggtacgggaagcgaactactcagggaattctaaacgatttgaggaatgcc

SEQ ID NO: 2984 - DNA, 245 bp, Zea mays
  misc_feature: Incyte ID No: 700161489H1
  unsure 197: a, t, c, g, or other
gcccaatgcgacagtgatcttgcgcaatgccaaaatagacatgttcaaaggatcaatgaggcttgcagtggacaagtgggggcggattgaggctgtagagccagccagtttcacggtgaaggaagacaacaacctgtctctaatagagtatgaattggttaatgtggctgagtaactgtccaatccaagcgtttctnccccctttatttcgtgccataagaaggaagtaccatgaatgaacatta

SEQ ID NO: 2985 - DNA, 245 bp, Zea mays
  misc_feature: Incyte ID No: 700161490H1
  unsure 190: a, t, c, g, or other
aagtctctggactttagcaactatccttacatatatatgagatggaaagaacagtattttgtcaatgttggagttgactgtgggttaaccatcgctggtttctactacgtctgcttttcttgtagtgatggctccattagtggattttattatgatccaaatagcagtccgtttcagaagctcgaattgnagtgtaccaatgagaaaaattctggattcaccttttcatcctatgagctgcagtg

SEQ ID NO: 2986 - DNA, 246 bp, Zea mays
  misc_feature: Incyte ID No: 700161492H1
ctgcaaacaacgaaagctggtgagcaactttgtcaagcctcaagagctcatggaagatggcagtgctccaagacggtctactccacccacccgcagaagcagatctgccgagttccacaatttttcagaaaggaggagaagggataagatcaacgagaagctgaaagcattacaggagcttcttccaaactgcaacaagaccgacaaagtttcgatgctagacgaagcaatcgactacctaaaatc

SEQ ID NO: 2987 - DNA, 244 bp, Zea mays
  misc_feature: Incyte ID No: 700161493H1
atggacttggggacaatggagccagctggtctcaactactggaaactcttccccttcctaatataaaatggatatgccccactgcaccttcaagacccgtgtcagtgtttggcgggttcccctccacagcatggtttgatgttgctgatctttctgaggatgctcctgatgacattgagggaatcgatgcctcagcagcacatgttgcgaatttgttgtcaactgaacctgctgacatcaaact

SEQ ID NO: 2988 - DNA, 245 bp, Zea mays
  misc_feature: Incyte ID No: 700161494H1
ctcaccaccgattcggatggcatccccagttcgcatgaggccagcctctccaatgtttgcctcctcagctccagctcaagggccgaaacttgtgaggcctgttcaattgaaggatgtgcaagatcaaccaaggaaggaaacagctccatccgtgatccctgttcaggtaaaggacgtgcaataccaatcaaggaagagctcaatgtctcctgcgattcctgtcctggtaaaggatgcacaacgcc

SEQ ID NO: 2989 - DNA, 246 bp, Zea mays
  misc_feature: Incyte ID No: 700161495H1
agctgatgctgagagcaagattgtccctgccactgctatccctgatgactggatgggtcttgatgttggccctgatgccaccaaaacattcaacgaagcattggacaccaccaagactgttatttggaacggccccatgggagtgtttgagttcgagaagtttgcagctggcactgaggcgattgccaagaagctagctgagcttacaaccacgaagggtgtcactaccatcatcggcggcggcga

SEQ ID NO: 2990 - DNA, 248 bp, Zea mays
  misc_feature: Incyte ID No: 700161496H1
aacggcatctccattggcctcctcaacctctgcctcgggttcaactctgttggcttctaccagatgaccaagctggccatcatacccttcaccatagtcttggaaaccctctttctgagcaagaagttcagccagagcatcaaggcctccctcatggttctgctgctgggagtcgggatcgcgtcggtcacggatctccagctcaacctcctcggctcgatcatcgccgtgctcaccatcgtgcgaca

SEQ ID NO: 2991 - DNA, 258 bp, Zea mays
  misc_feature: Incyte ID No: 700161501H1
attcttgagtattacctagattcaaaaggccttggggtttgcagaattgatggtagtgttaatttggaagagaggcggcggcagatagcagagtttaatgatttgaatagcagtctgaatgtctttattctgagcacacgggctggcggacttggtatcaaccttacttctgctgatacatgtatcctttatgacagtgactggaatcctcagatggatcagcaggccatggatcgatgccaccggattggtcaaaca

SEQ ID NO: 2992 - DNA, 257 bp, Zea mays
  misc_feature: Incyte ID No: 700161502H1
  unsure 58, 79, 106, 113, 120, 127, 185, 191, 211, 217, 235, 244, 256: a, t, c, g, or other
gcggcgtggctggttgccaagaacaccctcaagatcatgcccttcaagctcccgcccntcggcccttatgatgtccgcntgcgcatgaaagcagtggggatttgcngcagcgntgtgcantacctcntggagatgcgcatcgcgcacttcgtggtgaaggagccgatggtgatcgggcacgagtncgcggncgtggtcgaggaggtgggcnccggcntgacgcacctgtccgtanggcgaccgngtggcgctgganc

SEQ ID NO: 2993 - DNA, 251 bp, Zea mays
  misc_feature: Incyte ID No: 700161505H1
  unsure 109, 143, 199, 249: a, t, c, g, or other
gctccgcctccgatcaaggaaaaggaagatgagctactacggccagcagccccccgtcggcgtcccgccgcagcaaggctacccggggaaggacggctacccgccagcngggtacccgccggccggctaccccccgccggcgnagggctacccgcagcagggttacccacagcagggctacccgccgcagtacgcgcancgcctccacagcagcagcagagcaacgggcttcttcatggaagatctttntt

SEQ ID NO: 2994 - DNA, 196 bp, Zea mays
  misc_feature: Incyte ID No: 700161506H1
aaccctagcagccgcccggtgctccctctctgcagatctcccttcgcagccgccgaggaaccccttcacagcgcggaagatggctgaacaggaggccccagtcgcggttgaggcaccaaccccagttcttggggagcctatggacttgatgactgctctgcagctcgtgatgaagaagtcaagtgctcatgacggt

SEQ ID NO: 2995 - DNA, 251 bp, Zea mays
  misc_feature: Incyte ID No: 700161507H1
gggtttgccacagaactccattttcatgagcatcctcggtggcaccatcattttaccagttcatcctggtccagttcctaggagattttgccaacaccacgcctctcacccatctccaatggctcgtcagcattctctttggcctcctcgggatgcccattgctgctgccatcaaactcattcctgtggaacctcgcgaagatgatggccggataccataatcatgtacattaagagcaatagatcagctt

SEQ ID NO: 2996 - DNA, 151 bp, Zea mays
  misc_feature: Incyte ID No: 700161508H1
gctagctgtgtcctgcctacctagcggtatcaatacccggctgcagctcaccaccaccaccaaccaaccaacccacagttcccatataggcagccatcggctacacagcctcgcctccgtaagcagagtgtgtcgttggaagagagacgac

SEQ ID NO: 2997 - DNA, 245 bp, Zea mays
  misc_feature: Incyte ID No: 700161510H1
cactctttgtgatgctggtgattccgttgtcatgtttgcaccgtattatttcaatgcctacatgtcattccagatgacaggtgttactgacatattagttggtggctgcgatcccaagacacttcatcctgatgttgattggttggagaaggttctgaaagaaaatgagcctatccctaaacttgtcactgttgtgaatccgggggaacccctctggagcttttattccaaggcctatgcttgag

SEQ ID NO: 2998 - DNA, 245 bp, Zea mays
  misc_feature: Incyte ID No: 700161511H1
tataaatcgaaatacactgaaaaatggaccggtttccgtttcccggtactcccgatcagtacaggaaacggtaaattttaccggttccagtaaataccggacgagaagttcgtccctgcatcaattagatcatttagttttgtctaaaaaaattagctttatcgtagtagctcggtagccccctctgatctgtttctagatctgccactgtgcggaaccgctgctgctcggcccgttctatcaca

SEQ ID NO: 2999 - DNA, 245 bp, Zea mays
  misc_feature: Incyte ID No: 700161512H1
  unsure 238: a, t, c, g, or other
ccggcgcctccacttcgttttcctcactctctcctccagctcagggtccggcggcgaagggaaggcaagatgtacaccgcgaggaagaagatccagaaggagaagggtcttgagccctccgagttcgaggactccgttgcccaggctttctttgatctggagaacgggaaccaggagctcaagagcgacctcaaggacctgtacatcaacaatgctatccagatggatgttacggggnagaaggc

SEQ ID NO: 3000 - DNA, 219 bp, Zea mays
  misc_feature: Incyte ID No: 700161514H1
  unsure 213, 217: a, t, c, g, or other
acccaccaccagcagcaagcagcaatcagcaaccagcataacgaaatgtcgatcaagtactgcgaccagcacaaggactgcgagcggcagcgtctgtaccgtcgcttctgcgccgccctggtgggcgtcatcgtgctcgtcctcctcatcgtgctcatcgtctggctcgtcctccgccccaccaagcctcgcttcttcctcaacgacgtgagnatcntg

SEQ ID NO: 3001 - DNA, 249 bp, Zea mays
  misc_feature: Incyte ID No: 700161515H1
ccaagcaacaaacttggcattcttgcctgttcttaattattgccaggacaggagaaacaaagatgaggcctcagctgatactcgtcggcactctggctgttctcgccatcctcgcagctctcggcgaaggctcgtcgtcctggccctgctgcaacaactgcggtgcttgcaacaagaagcagccgccggagtgccagtgcaatgacgtgtcggtcaacgggtgccatccggagtgcatgaactgcgtca

SEQ ID NO: 3002 - DNA, 252 bp, Zea mays
  misc_feature: Incyte ID No: 700161518H1
cgcgaccgaagtcaacggtgggcacgccggcgtacatcgcgcccgaggtgctgtcgcggcgagagtacgacgggaagcacgccgacgtctggtcgtgcggagtcacgctctacgtcatgctggtgggggcgtacccgttcgaggatccaaaggacccaaagaacttcaggaagacaatacagcgcatcatgtcggttcagtacaagatccccgagtacgtgcacgtctcccacaactgccgccacctcctct

SEQ ID NO: 3003 - DNA, 179 bp, Zea mays
  misc_feature: Incyte ID No: 700161519H1
  unsure 127, 166, 171: a, t, c, g, or other
gcttcctccgcgtacgcctcatggtccaagcggtggatccgtcccgaggtgtacccgctgttcgtgccgatggccgtggccctgggtatctgctcgtaccagcttgtgcgcaacatcacgggcaacnccgaggtgcgggtgaccaaggagaagagggcggccggcntcctnggaaaacc

SEQ ID NO: 3004 - DNA, 248 bp, Zea mays
  misc_feature: Incyte ID No: 700161521H1
ggaatatgttgagggccttatagagattcccagaatcaatgaagaatcattgccagaacagttaaagggcttgcttggccaaactgcaggagctctacaacaacttcctagccctataagggatgctgtttcagaggggcttaaattgccacttagtggatcatttcaacgcttattcatgatctcttacttggatgaagaaatattgattatcagagatgctgctggagcactgacgtcttaaccag

SEQ ID NO: 3005 - DNA, 245 bp, Zea mays
  misc_feature: Incyte ID No: 700161522H1
  unsure 91-113, 239: a, t, c, g, or other
tgaggagaagggctgcctatatgcatgcctgttcactgcgtgctgctgcttctgctgcttcgagacctgtgagtgctgcctcgaggccatnnnnnnnnnnnnnnnnnnnnnnntggagggcatgggcgtccatcatcgtggagatgtggccatgcgggacacccaccgccgaataaaatgctgtacttatatgcacgcacgttagaaatgcatagtgtctgtttgatgtgatcctgtgngggtgc

SEQ ID NO: 3006 - DNA, 247 bp, Zea mays
  misc_feature: Incyte ID No: 700161523H1
ctgaagaaatcgatgacgtaagtacatgaaaatctagctgacaacagtgacttgcctactgccagtgaagctacggtaccagattcccagcctacagaaataaatgctaagcgagagaaagatcataggacatgcaaggctgatcatacttgtgaaagatggtggaaaaagaaaaccacgtatctatttcatcatataaaaggagtgactacactctgctcagttgtggcagctggtgctgttgttg

SEQ ID NO: 3007 - DNA, 243 bp, Zea mays
  misc_feature: Incyte ID No: 700161524H1
cttaccgccctcgcaaacataaaagctgctaagtgaatctccaatggaactagaccgacaataaatcggaagcagctgtcttgttgatcgaggagcgcggaatctgcaaactggcccttcggtgttttggatgtgctgcggaaacatgttatgatgtgtatataaaaaacgtagcatgtgctgcatgaactcctgtaggatgtctaactactgaagtgcagattcagcctcaactagtctact

SEQ ID NO: 3008 - DNA, 242 bp, Zea mays
  misc_feature: Incyte ID No: 700161525H1
gcagcgaggactgccgctacgagcagatgcaccacgacgcggcggccacggcctacgcgcggcatcaggccagcagccggcggaggcagcagcggagcaggggcggctctgtgtccgccaacgaggcggacgtgtacgtggccagctagagtaagagcaagcgcaagtgcaagcgcggcgaggccgaggatggtgaaggccgtgcgctgcctggttcaagcaagagaatcccgtcggtggag

SEQ ID NO: 3009 - DNA, 241 bp, Zea mays
  misc_feature: Incyte ID No: 700161528H1
  unsure 49-50, 142, 200, 203, 212, 235: a, t, c, g, or other
cggttttctccctcgaggaatccgacctcaaggcgctggcggcgccggnngtgcttccgggccccgcggtcgtcgtgccttgaggtcgcggtgtactacctggcccgcttcggcgcttcacgctgtggtgtcctcgcctgcnggaggaagcggctggttggcgtgttcagggtggagctcgcttcgtcggaatggcgganggnaagcccgtnttgtggaacaaggggtgggtgangaacaa

SEQ ID NO: 3010 - DNA, 167 bp, Zea mays
  misc_feature: Incyte ID No: 700161531H1
  unsure 14, 49, 67, 69, 72, 77, 81, 86, 88, 91, 93, 96-97, 111, 120, 127, 149,156, 160, 162: a, t, c, g, or other
gtaaaaaatctgcnacgtttggttgagcctatagattctactagccagnttctgactatccataggnancanacgcncccnaagantnggnanganngaaggatggtggantgggtagcnagctgcnggctgcttggttcaggagttgnggttaanttancntctga

SEQ ID NO: 3011 - DNA, 148 bp, Zea mays
  misc_feature: Incyte ID No: 700161532H1
  unsure 114, 125, 132, 141-145: a, t, c, g, or other
ctttaattcatataaagttaggcttaacattagtgcaaacagttgtattttagtttagatttagagtacacttatgtatgcattgtttgacaatgtttatttatgatatattanatggtacttanttatatnatattaaannnnnaaa

SEQ ID NO: 3012 - DNA, 246 bp, Zea mays
  misc_feature: Incyte ID No: 700161533H1
aggtgatcaagctcatgcagagcttcaagtccaaggagtatgtcagagagaccttctcctggcagtactactactggtacctcaccaacgatggcattgagcacctacgcaactacctgaacctcccgtctgagatcgtgcctgccacgctcaagaagtctgccaggccactgggccgtccatttggctctggccctcctggtgaccgcccaaggggccctggtcgttttgaagacagaccaaggg

SEQ ID NO: 3013 - DNA, 245 bp, Zea mays
  misc_feature: Incyte ID No: 700161534H1
  unsure 36, 219: a, t, c, g, or other
gctgtatgccaagaaggactacaacctggcgaacancccgcagatcgatgtgcccaacctccaggtgatcaagctcatgcagagctttaagtccaaggagtatgttagggagaccttctcctggcagtactactactggtatctcaccaacgatggcattgagcacctacgcaactacctgaacctcccgtctgagatcgtgcctgccacgctcaagangtctgccaagctactggccgccattt

SEQ ID NO: 3014 - DNA, 243 bp, Zea mays
  misc_feature: Incyte ID No: 700161535H1
  unsure 241: a, t, c, g, or other
caaaataaatatattgaacactgacgagaagattaacagtggtggtctttctcagcagttggttatgcctcttggtagtaaagttcaaccccagcaggttcccaagactaatgatgcaatcggctctgattctgctaacacaaatgaaaaccctattcttggtggaagagtattttctcctccagttgtttctggggttcaatggagacctcaagctgctgctgcatttcaaaatcaaagngg

SEQ ID NO: 3015 - DNA, 242 bp, Zea mays
  misc_feature: Incyte ID No: 700161536H1
  unsure 189, 193, 199, 202, 207, 212, 216, 219, 227, 233-234, 236, 238: a, t, c, g, or other
gtccgatctctctcccgagtccactccaagccttttcgccttttcctccgccttctcgcgatggcgccgccgcgccgcgctctactcgtcctcgccgctctcctcctctccctctcccttggggccgcctccttccattccgacgagctcctcctcaacgatgacgaagagttcgagggcgtcgtcgcncgcncctccnaanactcnccgcnggcngcncggtggtntcttcnncngnggaa

SEQ ID NO: 3016 - DNA, 243 bp, Zea mays
  misc_feature: Incyte ID No: 700161537H1
  unsure 20: a, t, c, g, or other
agcccaccgaattccctgcnattcctctcccctcgcctcctcgtctccccctaggggatcgtcggagaggaatcgcaaagagggccgtctcatccgagttaaggaagccatggagcacaaggaggctgggtgccaggcccccgagggacccatcctctgcatcaataactgtggcttcttcggcagcgcggcgaccatgaacatgtgctccaagtgccacaaggagatgataacgaagcagga

SEQ ID NO: 3017 - DNA, 238 bp, Zea mays
  misc_feature: Incyte ID No: 700161539H1
  unsure 74, 87: a, t, c, g, or other
ctcaattagtttgatgtttggcaaagatcatgcaaccggtgaagtcgcaaagaccctagctgatggcgcgaganacatgagtaaggnagaggtgatgcgcgcaagtacgattccttgttggcacttctggtgatccttaggaagagatggctgctgaagcaactgaaaaagtgaaccgagttgtggtttggtgaattgaactactgttggatgtgttgccgagtgaaaaattgttggt

SEQ ID NO: 3018 - DNA, 237 bp, Zea mays
  misc_feature: Incyte ID No: 700161540H1
ccaaattaatctaacaacgaacgacaactccacgcagagcaacaatggcgccgccgatgaaggtgtacgggtgggccgtgtcgccgtggatggcgcgcgcgctggtgtgtctggaggaggccggcgccgactacgagatcgtccccatgagcaggtgtggcggcgaccaccgccggccggagcacctcgccaaaaacccgttcggtgaaatcccagttttagaggacggtgatatca

SEQ ID NO: 3019 - DNA, 190 bp, Zea mays
  misc_feature: Incyte ID No: 700161541H1
cccatctgtagtgtggtctgcggccaagagcccggggaaacgatcgagacgatatgtgtgggggagcaatccttgccggactcatcccagcgcgggtgcaccggccgctgaccgccgccacgctctgggcggcggccctgagtgggaccagtaccgtcggcaagtggaaggccgatgcagccgccgctac

SEQ ID NO: 3020 - DNA, 232 bp, Zea mays
  misc_feature: Incyte ID No: 700161543H1
  unsure 2, 203, 227: a, t, c, g, or other
cnacgcatgcatgcgtttggactttggtgttcatccctggggtggggccgccgtgggggaagttaggagtttggtggctttctagctctgtcttcttgttttctgtttattataaattttctgaacccttccatgcctgatcgatacgcgctgtggggtaataattgttagaaaatgtgacattttgtacgtaatcaatccanggggtgcggtagttatcgcgtcangggac

SEQ ID NO: 3021 - DNA, 138 bp, Zea mays
  misc_feature: Incyte ID No: 700161544H1
  unsure 126, 137: a, t, c, g, or other
agcacagctagcgcctgctccccttcgcctgtgatcatgtcttgcagcagcggcaagtgcgactgtggctccagctgctcctgcggcagctcatgcaactgcatgtcccctaacgtggagaccgcngccgccagcana

SEQ ID NO: 3022 - DNA, 237 bp, Zea mays
  misc_feature: Incyte ID No: 700161546H1
ggtggtggttcgtttctgatctctgagagtccgccccccctaaacaccgcttgggctatcccgaaccctaaccccgaccgccgcgccagtactcccgtttcgtcctcgcggcattcgcggcgttttctccctctgctcgaaccgcgccgacgagcgacgacaagagctgctctattcttcaaaacaaatggcgaccgttccagttaacccaaaaccttttctgaacaacctgacagg

SEQ ID NO: 3023 - DNA, 134 bp, Zea mays
  misc_feature: Incyte ID No: 700161547H1
  unsure 46: a, t, c, g, or other
aacgataccaccaccgctagcgctagtgctctactgctctgctctntagggagagagagacgggagtgagagagcagagatggcagctgagagctagactgagcacgcacgtaacgtaacaggctcttctccca

SEQ ID NO: 3024 - DNA, 242 bp, Zea mays
  misc_feature: Incyte ID No: 700161548H1
  unsure 207, 216-217, 220: a, t, c, g, or other
ggctcctatctggtataggacggagctgagcttctagcaacgtacagtgtatccgccatgagtcctttcggggcggtgatcacgccagaaaccctcaagtacatgtccaagtaccagggacgtgagatcacgcaggtggactgcgcacgggaggcgatgaggctgatccacgcggaagacaagaacctcaaggccgaggactccagnttgggaacnngangaagaagttcggcaacggcgtg

SEQ ID NO: 3025 - DNA, 255 bp, Zea mays
  misc_feature: Incyte ID No: 700161550H1
accgacgccaacgacagagaagagagtccatctgctcgttgccttgattttgtggaacgaagcgatggctcgcagcggcgccatggtttcctgcatgctgctcctggtggtggcgcaactgctcatggtgatggccacgcagacagcggcggcggcgggcgaccaacgcggactggacgccggctgctgtggcaggtgacctgccactacagcgcctgtaactgccgcacttgcccgacatatggctgggcgtgc

SEQ ID NO: 3026 - DNA, 76 bp, Zea mays
  misc_feature: Incyte ID No: 700161553H1
caatccgtttgcatgtaaaactcagctgtggagtgtggtgttctctttggatgaaataaaaagaaagagcattacg

SEQ ID NO: 3027 - DNA, 129 bp, Zea mays
  misc_feature: Incyte ID No: 700161554H1
  unsure 115-117, 123-124, 126-128: a, t, c, g, or other
ataccgacttgattattcaaatctgcgattgggagcgtacgaagaggtaaagaaattcactggtgtaggcataggaaaccgaggccccccaaacccatctactatacggttgaannnaaccanngnnna

SEQ ID NO: 3028 - DNA, 57 bp, Zea mays
  misc_feature: Incyte ID No: 700161555H1
tctagtttcaatttaaattccaaaataaaatgcatcatccaataataaccgagcagg

SEQ ID NO: 3029 - DNA, 83 bp, Zea mays
  misc_feature: Incyte ID No: 700161556H1
  unsure 58: a, t, c, g, or other
ggtggggctggcgcagatgctccgtggcggggtcatcatggacgtggtgaccccggancaggcgcgacctcgcggaggacgcc

SEQ ID NO: 3030 - DNA, 220 bp, Zea mays
  misc_feature: Incyte ID No: 700161557H1
aacagatgcccttcgctctcgtctcagcaagcagcatcgaccgacgccaacgacagagaagagagtccatctgctcgttgccttgattttgtggaacgaagcgatggctcgcagcggcgccatggtttcctgcatgctgctcctggtggtggcgcaactgctcatggtgatggccacgcagacagcggcggcggcgggcgaccaacgcggactggacgcc

SEQ ID NO: 3031 - DNA, 258 bp, Zea mays
  misc_feature: Incyte ID No: 700161558H1
gcgcggcaccggcaacggcggcctctgcggcatcgccatggaggcgtcctttcccatcaagacctcgcccaacccgtcgcgcaagccccgccgcgcgctcatcaccagggacgcctcttcccagtgacaggctgatccatctcggcgtcgaactcgtactactggcacgtaagtaggagtacgttgacaggatgacatcctgctgctgctgtttgcttgtactattttcgattgtgtttgtaggtttgattgtgccag

SEQ ID NO: 3032 - DNA, 256 bp, Zea mays
  misc_feature: Incyte ID No: 700161559H1
caccaatggcggcgctcggaggacggcggaggagggcgtcgtcagcggccctccagctagccttgtttgcggtggccctggtctccctggccggcccagccacggccgcggggaacaagaccgggcaggtgaccgtgttctggggccggaacaaggccgagggcacgctgcgcgaggcctgcgactcgggcctctacaccatggtgatcatgtccttcctcgacgtctacggcccgcagcgcggcggctaccagta

SEQ ID NO: 3033 - DNA, 257 bp, Zea mays
  misc_feature: Incyte ID No: 700161560H1
ggcactttcatctgtgccctctgcgttcgagatcgatctcagctggcaccgtcccagttcgccatggcggaggaccggagccccaagcccatccactgcaaagcggcggtgtgccgagccgccggcgagccactcaccatcgaggagatcgtcgtcgacccgccgaaagcgtacgagatccgcatccgggtcatctgcacctcactctgccacaccgatatcaccttctggaaagtaagtggcaccggtgtttccaa

SEQ ID NO: 3034 - DNA, 196 bp, Zea mays
  misc_feature: Incyte ID No: 700161561H1
ggcatggcgaagtccattcatcacgctcgtgtgctcatcaggcaacgccacattagagttgggaggcaacttgtcaacattccctcattcatggtgagagttgactcagagaagcacatcgacttctcgcttaccagcccacttggtggtggagaacctggaaggtgaagagaaagaaccaaaagaaggcttctgg

SEQ ID NO: 3035 - DNA, 247 bp, Zea mays
  misc_feature: Incyte ID No: 700161562H1
cagacactctacatatatcctctgcgcgtgtatctcgtcgtacagagccgaaagctggagcttccaatggcgggagacaacgacctgaaggtgctcggcgtgtggacgagcccgttcgtgatccgggtccgcatcgtgctcaacctgaagggcctggcgtacgagtacgtggaggaggacctcagcaacaagagcgcgctcctcctggggtccaacccggtgcacaagagcgtgccggtgctcctcc

SEQ ID NO: 3036 - DNA, 261 bp, Zea mays
  misc_feature: Incyte ID No: 700161563H1
  unsure 13, 46, 156, 170, 173, 175, 182, 184-185: a, t, c, g, or other
cataagtacatanaaccaactaggcttgatcgatctctcgacagcnaatagctagcaataatggagaagtacaccaaagccctagcgtcattgctcaccatgctggtgctggcacctctcctcgccatggccaccgacccagaccccctgcagganttctgcgtcgacgnccncnacggcangnnatcagtgaacgggtagccatgccagccgccgtcgtcggccggcgaccagttcctcttctcgaccaagatcgccacg

SEQ ID NO: 3037 - DNA, 219 bp, Zea mays
  misc_feature: Incyte ID No: 700161564H1
tccccccgaattcgagccggaggaccgaagagtagatctgcgccgggcgaccagaggatggccgtcaactgggagctgcagggctgctgccaccgcgaccagaggatcttcatcgccgccgttggcgtctccaccgtcgtcatcctcctcctctggaggacgttcctgctcacgccgttcaagctcatcaccgtcttcctccacgagaccagccacgcg

SEQ ID NO: 3038 - DNA, 255 bp, Zea mays
  misc_feature: Incyte ID No: 700161565H1
  unsure 95: a, t, c, g, or other
caagaaggagtcacctcttggggtgccaacgcagtctgctcacccagctcggttctcaccagatgacaagtactctcgccagcgatacctgttgnaagaagagatttggacttctgccaacgcagaatccaggaccgaagtactgaagcttcaagtcaactgtccaacctgcgatgttctttttgtgtcaatgcttgttggttggaatgtactatcttcgttctcgaatatttgtggtccacttgttcaattttg

SEQ ID NO: 3039 - DNA, 211 bp, Zea mays
  misc_feature: Incyte ID No: 700161567H1
  unsure 189, 193, 200, 202, 209: a, t, c, g, or other
ccaaaatcatgattacagggaagtggaacaagtccctgagttgccaaccatgtgaccaagaaggcgatcctcttccaggcacggagctgaaggagatctggagagttgctcctgccccacagggcgacaagtatcagtacacacacttcgcacacaaaataaacagttcgacacggcacctaagaagcnggtngcatctnantcacggngg

SEQ ID NO: 3040 - DNA, 250 bp, Zea mays
  misc_feature: Incyte ID No: 700161568H1
cacaaacaacgctcccagccacatgtatcagaaggatgctgctgtcacatccacagaggacctgctgaagcccagctcaacatccaagtcgccagaccccaggcacgacgcccaagctagcactcaacctgcaggtacgggggtctccatgaagccggaaccggttattggagtctcaacaatcaagaaagaggactcctccttgacagaaggtgaggttgatggcggcacggaagagtgcctggagaag

SEQ ID NO: 3041 - DNA, 251 bp, Zea mays
  misc_feature: Incyte ID No: 700161570H1
  unsure 114, 116: a, t, c, g, or other
cagacagataccgtagaacagaaagaaaggcctcccgtccagagtcgtgtcagcgtaaagaaattccacagccaacaagaagccttctcgcctccttgactccttcctccatcntntcgagaaccatgggcaagctgtgctgcagccaggaagatgacgagccggcgttcaaccttctggggctgctcgtcaccgtcgtcctcgccttgctgctgctcatgctgtgcacacctccccggcgcaggcgctgg

SEQ ID NO: 3042 - DNA, 252 bp, Zea mays
  misc_feature: Incyte ID No: 700161571H1
ggcaggagcagccgcagtcccggcgatcccgccgccggtcgccctcacacctcctcgtcactgccttcgtttctctttccaacaatcaagatgagccgtggcggtagcgcgggtggtggtcaaagttctctgggttacctctttggaagcggtgagccccccaaaccagcagtggcaccaccagctgtaagtgctccacctgctgctgcaggtgctccacctgctgagaaaccacctgctgcaaagcctgat

SEQ ID NO: 3043 - DNA, 253 bp, Zea mays
  misc_feature: Incyte ID No: 700161573H1
atgcgcaccaaagtttcttcttcaaacgagggcggcgttgctgcagggtttgccgttttggacagcgttctcctgactgatgagtgagacagcagcgaggtggcagagctatgggtgacacctgacctgcattagtgacagtgcccacagtcaactcaaacgatgacaatatcaactgcaatcgtaggggaaactatgaaattgcttacagaattgcggacagtcggagaagatggcagtgttacgttatgat

SEQ ID NO: 3044 - DNA, 252 bp, Zea mays
  misc_feature: Incyte ID No: 700161574H1
ctggactgcaatgaagaaatctacgtctgggttggcctacactcagatattacatccaaggagcaagctctcaatgttggcaagatgttccttaaggatgctgttcacggtggaaggtcaatggaaacgacagtgtatgctgtcacagaaggggacgagcctggatttttcaccagcttcttcgactgggacaattcgaagcaatcatatatggttggcaactcatttgagaggaagctcgccgtcctgaaa

SEQ ID NO: 3045 - DNA, 239 bp, Zea mays
  misc_feature: Incyte ID No: 700161576H1
  unsure 207, 214, 236: a, t, c, g, or other
acatcctgcatgggtgaagatggttgggccttcagcagccacaaaaaaagtatatgccctagctggcttgttggtgctctgtgattctcagaagcactgaattgtgaataccatcaaaagaggcatcaatttaccggcaggttattttaccagtcacaatgatgcttcctggaatcaaaataactatcttccgaacaaatcatgganccttcancctataatatcttcatacaganatc

SEQ ID NO: 3046 - DNA, 252 bp, Zea mays
  misc_feature: Incyte ID No: 700161577H1
  unsure 168: a, t, c, g, or other
gtgcttcagcagcctatcatgcctgctcccggccagcctcacatggatccaatggcctgcggtctgtccagtggtcatgtggttaatggaatacctgcaccaggtggttatcatcccatgcgcatgaactccggaaatgacatggttttggacaatggagtgcctgangcaccacatgctggtgctaccggtagtgctatgtcatctgagatggctgtgagtccctcgtcggcggcttcaagcaaccatgct

SEQ ID NO: 3047 - DNA, 255 bp, Zea mays
  misc_feature: Incyte ID No: 700161580H1
  unsure 218-219: a, t, c, g, or other
ggccttctcgacggtggtggccgtggagggcatcaacgccatccggacgggcagcctggcgtcgctgtcggagcaggagctgatcgactgcgacacggacgagaacgggtgccagggcgggctgatggagaacgccttcgagttcatcaagtccttcggcggcatcaccaccgaggccgcgtacccgtaccgcgcgtccaacggcacctgcgacggcnntcgggcccggcgcgggggaggcgtcgtcgtggtgat

SEQ ID NO: 3048 - DNA, 247 bp, Zea mays
  misc_feature: Incyte ID No: 700161581H1
  unsure 222: a, t, c, g, or other
catgtctttgaggagatgcagaggccgggtaccccgctctacaacatcaaggctttcctccctgtcatcgagtcctttggtttctccagccaactgagggccgcaacctctggtcaggcgttcccccagtgtgtctttgaccattgggacatgatgggctcagatcctttggaggccggctcccaggctgctcagctggtgctggatatccgcaagaggaanggtctcaaggaacagatgacccctc

SEQ ID NO: 3049 - DNA, 245 bp, Zea mays
  misc_feature: Incyte ID No: 700161582H1
  unsure 186: a, t, c, g, or other
gcgagtactggcgcacggcgcggaaggtggtgaacacgcacctgctcagcgccaagatggtcttctccaagcggcgggagcgggaggaggaggtgcgcctggtggtggcccggatccgcgacgccgccgaggcgtccccggggacggcgctcgacatgacggagctgctgggcggctacgccagcnacttcgtgtgccgcgccgtgctcggcgagtcccaccggaagcagggccggaacaagctg

SEQ ID NO: 3050 - DNA, 244 bp, Zea mays
  misc_feature: Incyte ID No: 700161583H1
cctgaggctgcatctgctataccagaaacagacctgccagaatttgtacaggtgataagatcatgtcgagatggtatccacaaggtggtggaattactgcagcacaagtttccaaatgttccaaagactcaactgaatcgtaaagtgagggagatatctgacttcattgacaatcattggaaggtaaagaaagagattcttgacaagctagggttggattcgtcaccagtgaaacccaagaaga

SEQ ID NO: 3051 - DNA, 245 bp, Zea mays
  misc_feature: Incyte ID No: 700161585H1
  unsure 108, 185: a, t, c, g, or other
caaaaatatttcatgtggaaagccttgagaagacagctcaagatgatttccaaaagcttgcatctgctgtttacctgcaagttagcaccatcagccaggccctcatcntcgtgacaaggtcccggagctggtcatttgtcgagcgcccagggtttctattggtctttgctttcttggttgcgcantgattgccacactgattgctgtgtacgccgactgggcgttcacttcgatcaaaggcattg

SEQ ID NO: 3052 - DNA, 220 bp, Zea mays
  misc_feature: Incyte ID No: 700161586H1
gcggactgactggcaactactggcacgacttcagcgacatcatgatcccgctctacctccaggcggcgcggttcgagggcgaggtgcagctggtggtggagaacatccagccgtggtacgtgggcaagtaccgggccatcctgcggcggctgtcgcggcacgacatcgtggacatggaccgggacgaccgcgtgcgctgcttcccgggcgcggtggtggg

SEQ ID NO: 3053 - DNA, 246 bp, Zea mays
  misc_feature: Incyte ID No: 700161587H1
  unsure 226: a, t, c, g, or other
accgagctaggaggcatcaccttcgccgatccaacatgggtaagacacgtggtatgggagctgggcgcaagtcaagacccacagaaggaaccagaggtgggctgacaaagcctacaagaagagccatctcggcaacgagtggaagaaaccctttgctgggtcatctcacgcaaagggaatcgtccttgagaagatcggcattgaggctaagcagcctaactctgcnatccgtaagtgcgctcgtgt

SEQ ID NO: 3054 - DNA, 248 bp, Zea mays
  misc_feature: Incyte ID No: 700161589H1
ccaaaatcatgattacagggaagtggaacaagtccctgagttgccaaccatgtgaccaagaaggcgatcctcttccaggcacggagctgaaggagatctggagagttgctcctgccccacagggcgacaagtatcagtacacacacttcgcacacaaaataaacagcttcgacacggcacctaagaagctgttggcatctgattcacggctgaggcctgatagatatgccctcgagaagggtgacatg

SEQ ID NO: 3055 - DNA, 248 bp, Zea mays
  misc_feature: Incyte ID No: 700161590H1
  unsure 30, 210, 216, 223-224, 227-228, 230-231, 234, 238, 240-242: a, t, c, g, or other
cacagattaccctttctttgaagaagaagntggcaagaatgaggagtcagtctgatcacaactaataatgtggagggttcatcaagtttgagttcatcattatttccaccattcattattggccattgtggcggagtcattgcgtcgtgttgtttcattatgtactagtgtaaagtgaaataaatcatgtactagtgtgaagtgaaaaanaaaagnagagagnnaannannaanaagngnnnaacaaa

SEQ ID NO: 3056 - DNA, 246 bp, Zea mays
  misc_feature: Incyte ID No: 700161591H1
gctcattccattagttcgaattggaactctttagtcagtgcgctaagatctctttgtagaggaaatgattggctattgtttctcaaggtttcactatctctgctggttgtcagcatccttagttctatgtcttctcagtctgcatttaaaataggtactgctctggttttcacaggcttcaaagcgtatgagaaatgggaggacaacattgatagtatggtgggcgacgcctgtaccattcttctg

SEQ ID NO: 3057 - DNA, 248 bp, Zea mays
  misc_feature: Incyte ID No: 700161592H1
ctgagaaggaaaagcagcggcttctcgcgcggcgcttcgatctaccggggagtcaccaggcatcaccagcacgggcggtggcaggcgcgcatcggccgcgtctcgggcaacaaggacctctacctgggaacgttcagcacgcaggaggaggccgcggaggcgtacgacgtggccgcgatcaagttccgcggcctcagcgcggtcaccaacttcgacatcacgcggtacgacgtggacaagatcatgga

SEQ ID NO: 3058 - DNA, 238 bp, Zea mays
  misc_feature: Incyte ID No: 700161594H1
  unsure 97, 144, 148, 159, 164, 168, 171: a, t, c, g, or other
cgtcccgctccagcgcctctccctcgacccggccctcctgctccctaacccctccgccgttgtcccactcctcaccgactcggcggcgccgcttgcntcgctccgcctcgccaacggcgccttcgtctacctcgcatacccgcncgangcgcgctcggnccgcncgcngcngcccaaggcactttccgccgctggctctttcggcaaaaagatgaccatggatgaccttatcgcgcgc

SEQ ID NO: 3059 - DNA, 250 bp, Zea mays
  misc_feature: Incyte ID No: 700161596H1
  unsure 13, 57, 227: a, t, c, g, or other
gggggtgtgaganggacactcccatggatggctccagaattactcaatggaagcaanaataaggtgtcagagaaggttgatgtattttcttttggtattgttatgtgggaaatcctcactggcgaagaaccatatgccaatatgcactatggcgcaattatagggggcatcgtaaacaacacactgaggccacatgtgccagcttcatgtgatccggagtggagaangctcatggagcagtgctgggctc

SEQ ID NO: 3060 - DNA, 73 bp, Zea mays
  misc_feature: Incyte ID No: 700161603H1
cctattttgaaacttccctagctgtattcagtccattttttgtgaactattctgagagtactattctgaactt

SEQ ID NO: 3061 - DNA, 209 bp, Zea mays
  misc_feature: Incyte ID No: 700161604H1
  unsure 27, 30: a, t, c, g, or other
aactaatccggccggctgcggctgcantanctcatcggcaaagctgcagtataaattcaggggagctccatcgacgagtgagctccctgggggaccaggctgggagagcccccccgtcaggccccctcctcctcctggtctcctctcttctatccgagctcggcattcagggctactacacctgcttacatccatcgttcatgcatggt

SEQ ID NO: 3062 - DNA, 267 bp, Zea mays
  misc_feature: Incyte ID No: 700161605H1
ccagactacgctgaagctatcaaaggaataaagaccagccaaagacctctagctgtagccgcataaggagctggacgtgtaatcatttactctgtgcaagtttaccagtgatgcaatctgtatagatgtgtgtcttgtccagccatacgtataccggagatgaaaggagacggaggcagtgaagaaatatccttttttttcttctcatttttcacgaggatgcggtgcactgctcccagaatgctgtgtccaatttacaaacgcaca

SEQ ID NO: 3063 - DNA, 268 bp, Zea mays
  misc_feature: Incyte ID No: 700161606H1
  unsure 123: a, t, c, g, or other
ctaacttatgccagtcctgttataggttatcagttcctctgtatattagtcattatacagcacttgcccttgggaatgggagtgggggagacaaatgttcagttttatgtacttatgtgaganatctcatattactatatgagataagtctcttactaattactatattagataagcttccaaccagtgtttattcataccattttctctctctgtctaatatgttgttttatgaactctgtttcccccttattagtgcatacatgat

SEQ ID NO: 3064 - DNA, 269 bp, Zea mays
  misc_feature: Incyte ID No: 700161607H1
  unsure 133, 194: a, t, c, g, or other
caccggccacgtgcacgcgtacgagcggtcgaaccgggtgttcaactacacgctggacgcgtgcggccccgtgcacatctcggtgggcgacggcggcaaccgcgagaagatggcgacggcgcacgcggacgangccggccactgcccggacccggcgtcgacgccggaccccttcatggggggccgcctctgcnccgccaacttcacgtcgggccccgccgcgggccgcttctgctgggaccgccagccggagtacagcgcgtacaggg

SEQ ID NO: 3065 - DNA, 190 bp, Zea mays
  misc_feature: Incyte ID No: 700161609H1
  unsure 54, 58: a, t, c, g, or other
ggggggtgggttgcggttgatgcttatttatgcacagtttttgctacggtcggngctngggctgggacgttggtgtaatgtggtgaataagcgagtgcatgcaacgcaattggaacttaagacatttttggtaaaatactctttcgtattctgttctctgttctatgaatattggtaatatgcgtggctc

SEQ ID NO: 3066 - DNA, 256 bp, Zea mays
  misc_feature: Incyte ID No: 700161610H1
  unsure 126, 166, 182, 255: a, t, c, g, or other
ccacaatctttctttgtgcacagaaagaagaaagaacctatggcacagtcgtcgtccgcctccgtcaagctgctggttctggttgtcctccctgcgctcctcctgttcctcgtccaagcgcaaggngctcggccagcagcggcgaacgacgaccccgacccccgcnaccaccaccgggtgcncggcgtcgagcgtgacggtgtcgcagttcaacacgggcgacaggaccgggtaagaaccggtgttcgaagtgang

SEQ ID NO: 3067 - DNA, 263 bp, Zea mays
  misc_feature: Incyte ID No: 700161611H1
  unsure 229: a, t, c, g, or other
gctcttagctagccctagccacgtacccacacatcgtagacaacgcaattagctaggaatagcatccatggcgtccggggctgctgcttcctcggccctcttgctcctcgtcgcggccttggtggccaccagtgcgagggcggccacattcaccatcaccaacaactgcggctcgacggtgtggccggcggcaccccggtgggcggcggcacgcagcttgaccccgggnagacgtggaccgtggacgtgccggcggggaccca

SEQ ID NO: 3068 - DNA, 140 bp, Zea mays
  misc_feature: Incyte ID No: 700161612H1
  unsure 43, 52, 59, 65, 68, 70, 82, 100-102, 117, 121, 126, 129, 131, 134: a, t, c, g, or other
attggtagaaaaaaaataataaagaaaaaaaatatttatgacnatattccangatttanacagangtnantcagagattcanataccctcatataacttnnnccaacctttgttganatantatgnttngnaangtctcc

SEQ ID NO: 3069 - DNA, 268 bp, Zea mays
  misc_feature: Incyte ID No: 700161614H1
caagctttgtgctgatggacatcgacgggctccgtgtggtggtgtacgtctacgagctgattgacggcgaggtgaaggtggacaaaatcgacttcaagaagactgcgacgatgcacggctagccctatccttccactccgtgattgagtgcaagacatgtctagcttctgtttcttttctttcagcttcttgattcagagcctcctgaacacgctttctacctgttcatgcgcaaagaactttttaagtctggttgttaacaatgttt

SEQ ID NO: 3070 - DNA, 262 bp, Zea mays
  misc_feature: Incyte ID No: 700161620H1
  unsure 45: a, t, c, g, or other
gtaaatttgtagctggaggagaagatttgtgggttcatgtattcnatttcttcactggtgaagaaatagcttgtaacaaagggcatcatggaccggtccactgtgtccggtttgcacctggtggtgaatcatacgcatcgggttcagaagatggcaccattaggatctggcagcttagcccagttaatgctgatgacgacgaggcggccaatgcaaatggcaaggcaaatgctgcagtgaacgaggttacaaccaagctcga

SEQ ID NO: 3071 - DNA, 265 bp, Zea mays
  misc_feature: Incyte ID No: 700161621H1
  unsure 12: a, t, c, g, or other
gcgtgacgccgnggcaacgtggaggcgttcccggggctcaacacgctgggcctgtccatcaaccgcgtcgacctcgcccccggcggcgtcaacccgctgcacacccacccgcggtccgccgagctggtgcacgtggaggccggcgagatgctggtcggcttcgtcagcacggagggcaggttctactccaaggtggtgcgcgccggggagagcttcgtcatcccgcgcgggatggtgcacttccagtacaacgtcggcaaagccc

SEQ ID NO: 3072 - DNA, 263 bp, Zea mays
  misc_feature: Incyte ID No: 700161622H1
agagaagataaaatttgccatgaaaacactagctctggtgatgtctgtgctgaaccaaaagagtcgatgcttcttcaagaaaatggaataccagttgggactggaaacatggtagaagagaaggttgatgcacaaccacatgtggttgtccagcaatataaggaagaaactaacttatctccgttaacagatgccctcaagaagagcttgatgcaggaaaccaccttatctccatttgcagcttctcacaaggatagcttgac

SEQ ID NO: 3073 - DNA, 263 bp, Zea mays
  misc_feature: Incyte ID No: 700161623H1
agcggctgttcttcttcgagatggcctgcaagaactccgaggtcgcgtacgagcagaaccccaacgacgccgacaacctgacgcggtggggcggcgcgctgctggagctgtcgcaggtccgaaccggccccgacagcctcaagcttcttgaagatgcggaagccaaactggaggaggcacttcaaattgatcccaacaagtccgatgcactctggtgcttgggaaatgctcagacctctcatggattcttcactccagacaat

SEQ ID NO: 3074 - DNA, 262 bp, Zea mays
  misc_feature: Incyte ID No: 700161625H1
  unsure 41, 234, 250-251: a, t, c, g, or other
cgttctctccttcctatcggctccacacctccacgcaactngaagcttcgcttcaatctgccctactcctccgccgcctccaacaccgcagacgcagctgccgcgggcgggagcttggacgtgctactctgctctcatctcgtttccgcgcaggaattgttcacaatggcccgcgtgtatgttggcaacttggattcacgggtgacttctggggaactcgaagatgagttccgngtgtttggagttctgnnaagtgtttgga

SEQ ID NO: 3075 - DNA, 262 bp, Zea mays
  misc_feature: Incyte ID No: 700161628H1
  unsure 86: a, t, c, g, or other
agatctacctccattcttccctcaaaatcacagatctctctcggccccgtgcccagcgctccgaaaccctagcgccgccgcgggtnccaggccgcgagcgtcgccatgggcatcgtgtttacgcggctcttctcgtcggtcttcggtaaccgcgaggctcgcatcctcgtcctcggcctggacaatgctggcaagaccaccatactctatagactgcaaatgggagaggtcgtctccacgatcccgacaattggattcaacg

SEQ ID NO: 3076 - DNA, 262 bp, Zea mays
  misc_feature: Incyte ID No: 700161630H1
  unsure 195, 205-206, 210, 218, 222: a, t, c, g, or other
acctcatctgacataataaatggctagacatacatatccatataaaaaaaactttaaacaaaactttgattccctgaaccaaatgagaaactaaaattctagaccaaacttattgtatctctttttcttacaaatctcgaggacgagatttctgttaagggggtaggatttgtaaagcctaaaatatgtataganaaaaatatannatanataaaganatanaatagtaaaattcaaatatctcagattagacttgagtttg

SEQ ID NO: 3077 - DNA, 126 bp, Zea mays
  misc_feature: Incyte ID No: 700161632H1
  unsure 47: a, t, c, g, or other
ggttgtttgggaatgcagcccaaatcgggcggtaaactccgtccaangctaaatacaggcgtccgtctgatcaaataagcaccggtgttggtgctctatagatgaatatatccggtgattttcggc

SEQ ID NO: 3078 - DNA, 256 bp, Zea mays
  misc_feature: Incyte ID No: 700161633H1
  unsure 197, 214, 217, 221, 242: a, t, c, g, or other
actcggatagatctcagtgcagtgcttccctgttccctccatcaagaaacagcaaagatccagtgcagagagagagagaagcgccatggcactctgaacaagaaaagaaagagctagagagatctcagtcagccagtctctcacaacacaatgccggcaaccaccaagccgatcttgctcccaagggcgtgggaagnagcgccattcttcttcntgntgtngttgtcctgcagggaaaagangccatgcgtcggca

SEQ ID NO: 3079 - DNA, 258 bp, Zea mays
  misc_feature: Incyte ID No: 700161637H1
  unsure 6, 232: a, t, c, g, or other
cctgangctgcatctgctataccagaaacagacctgccagaatttgtacaggtgataagatcatgtcgagatggtatccacaaggtggtggaattactgcagcacaagtttccaaatgttccaaagactcaactgaatcgtaaagtgagggagatatctgacttcattgacaatcattggaaggtaaagaaagagattcttgacaagctagggttggattcgtcaccagtgnaacccaagaagataaaagcatagcta

SEQ ID NO: 3080 - DNA, 258 bp, Zea mays
  misc_feature: Incyte ID No: 700161638H1
caaccaggcttctacatgtgaccttaaagaacttgtttctaagttcattccggaagttattggcaaagagattgagaagtctacctccagcatcttcccacttcaaaacgtcttcatccgcaaggtgaagatactcaaggcccccaagtttgatctcgggaagttgatggaggttcatggcgactacaaagaggacgttggtgtgaagcttgagaggcctgtcgagggtgatgaggctatgcaggaggttgctgctgc

SEQ ID NO: 3081 - DNA, 258 bp, Zea mays
  misc_feature: Incyte ID No: 700161640H1
cattcaaggaacaatcccttctgagcttggtaatttgaagaatctaataagcttggacttgtacaagaacaacatttcggggacaatacctccttcccttggaaagttgaaatcccttgtattcctgcggctcaatggcaatcatttgactgggccgatcccaagggaactttctggaatatctagtctcaaagttgtcgatgtttcaagcaatgatttatgtgggacgattcccacatctggaccatttgagcacat

SEQ ID NO: 3082 - DNA, 256 bp, Zea mays
  misc_feature: Incyte ID No: 700161641H1
  unsure 225, 245-246: a, t, c, g, or other
cttgtgacatcaacatcaaaaggaatcgaaaaatggcgttgagcggcagcactgcattgccgtctctataatcgccttgaattgtatcaacggagattgcgagcagcagttatcttgaacaggcaggacctggccctagaatgcagcctgttgcgtgtcgtgactttctattattcgtcaggcagtagctttgtatttaggtaggatcctgagataatacatgtnatttctggtcgatatttatnngttgcattga

SEQ ID NO: 3083 - DNA, 217 bp, Zea mays
  misc_feature: Incyte ID No: 700161642H1
  unsure 147, 153, 155, 158-159, 161, 166, 169, 171, 178-180, 183-184, 189-191,193-194, 197, 199-200, 202, 204, 207, 211: a, t, c, g, or other
catgaaattgccagcacggcaacgacagaatgacaggatccacacagttgcttcaccagacagggagtgccctggtagagggaaaaggaagaggatttcctggtgttcaaaggatccaagctgcctcaaagacccaagaaaagagcntagggncntcnngngaccngcnantttgtannnccnngaacnnngnnaangnncntngcncctngaaggt

SEQ ID NO: 3084 - DNA, 259 bp, Zea mays
  misc_feature: Incyte ID No: 700161643H1
  unsure 241: a, t, c, g, or other
gcaccagaaatcctggctgtaattggcaaagtacctcacctctccgagtttctcaactccctgtacaactgccagtataagtcgttcttcgttgcattttctggtctgacagagcaaatcaagttagaccgttatcttcagcctcatttccgctactacatgagggaagtgcgcaccgtggtatactcacagttcttagagtcatacaagagtgtgacaatggaagcaatggccactgcgntcggtggtactggttgat

SEQ ID NO: 3085 - DNA, 256 bp, Zea mays
  misc_feature: Incyte ID No: 700161644H1
tgattattatttcttcaattgctggttacaatccagaacaaggattgacaatgtatggtgtcacaaagactgctctctttggtctcacgaaggctcttgctggtgagatgggacccgatactcgtgttaactgtatagcccctggttttgttcctacacggtttgctagtttcctcacagaaaatgagaccattaggaaagagcttaacgagaggaccaagcttaagagattgggtactgtggaagacatggctgc

SEQ ID NO: 3086 - DNA, 245 bp, Zea mays
  misc_feature: Incyte ID No: 700161645H1
accaagtttctccttagcaagctgaaggacctccaattttttgttggtgagtccatgaaggatgatgcgtctgtggtattcgcctattacaaggatggtgccactaatccgacattcctctatttctctcatggtcttaaggagatcaagtgctaggcgtgcggcgaaattagttacccatgttgggtactatctatgtactattattatatccaaaactatagttgtcctggctgaattgaact

SEQ ID NO: 3087 - DNA, 259 bp, Zea mays
  misc_feature: Incyte ID No: 700161646H1
cctcgtcatccaggccccggtgctgatcaaataccccgcgagcttatccctgaccgcctactcctactccttcgcaaccctgttcatggtggtcaccggcgcgttcgccaccagtgggctccacgagtgggcgctgacagcgaccgagatcttagccatcctgtacgctggagtcgttgcgtcctgcctgaactacgcgatcatgacctgggcgaacaagatcctcgggccgtctctggtcgccctctacaacccactc

SEQ ID NO: 3088 - DNA, 259 bp, Zea mays
  misc_feature: Incyte ID No: 700161647H1
  unsure 29, 55: a, t, c, g, or other
cttctcctccggcatcgacgaggcgaacnccagcgcccgagtccctctccctgcnccccacgacccatggcggcggatatggcgtacgcgccgccgatgaaggcgggcaaggccgggttcgaggctggcatgatggatccgcagcacaggatccgcatcacgctctcctccaagagcgtcaagaacctcgagaaagtctgcggggatctggtgaagggcgccaagggtaaggagtcaaggtcaagggccccgtgcggat

SEQ ID NO: 3089 - DNA, 260 bp, Zea mays
  misc_feature: Incyte ID No: 700161648H1
ctatgaatgcagctgtggtgatgacaatatgctatacatgagagagcatgacacttgcatcagcaaagagggaactgccactactgttggctggagcttcctctgggttattttctttggacttgtttttgccggggttggagcatacgctgtgtacaaatacaggctgcggagttacatggattcagagatccgtgccatcatggctcagtacatgcctctggataaccaagaaggagcaaaccagcatcaggtcgtgc

SEQ ID NO: 3090 - DNA, 174 bp, Zea mays
  misc_feature: Incyte ID No: 700161649H1
  unsure 90, 129, 131: a, t, c, g, or other
gaaagaacgaggctgacgacgacaagcgcgagctcgtcttcaaggaagacgggcaggagtacgcgcaggtgacccggatgctcggcaacnggcggtgcgaggccatctgcgtcgatggcacgcgccgcntnctgccatatccggggtaagatgcacaagaaggtctggatcgcg

SEQ ID NO: 3091 - DNA, 93 bp, Zea mays
  misc_feature: Incyte ID No: 700161650H1
caatacttggtgcaggtattgtagtctgtcgttccaaatcttttctgtaggcattagccatgcaacatgtctgagtctgacgaattttgtttc

SEQ ID NO: 3092 - DNA, 169 bp, Zea mays
  misc_feature: Incyte ID No: 700161651H1
  unsure 31, 123, 151, 166-168: a, t, c, g, or other
tcttcgctgtcgacgacgcggactccccgcngcgctccctctctcaggcctcgcggggtgatcagaggcggctgggagactcgtgcgctccgacgagtccggttacggcgcggtaattaagcnggggaggagccggccctgagcggcgaantccaaaatgagttannnc

SEQ ID NO: 3093 - DNA, 237 bp, Zea mays
  misc_feature: Incyte ID No: 700161652H1
  unsure 45, 49, 211: a, t, c, g, or other
ggggagccggaggtagaaagaccagagaagatggcgaccaccganccgngcggcggtgaggctggtgggctccttcgccagcccgttcgtccaccgcgccgaggtggccctgcgcctcaaaggggtgccctacgagctcatcctggaggacctggccaacaagagcgagctgctgctggcacacaaccccgtgcacaaactcgtgcccgtnctcctccacggcgacagggccatctc

SEQ ID NO: 3094 - DNA, 238 bp, Zea mays
  misc_feature: Incyte ID No: 700161653H1
  unsure 41, 198-199, 203, 207, 210, 217, 219, 226, 229, 232-233: a, t, c, g, or other
gctgtttttattcgtttgtcacataagcagtggtggtcggncggccggcgacaatgagcggccgtgtgttcgtcctggccgctgccttcggcgtgctgctcgccgcagccgccgtgtcctcgaggcccgtcctgactccgctgggtactagccgccctgctgccggcgacctgtccgtgtattaccacggggatcatnnccgnaacnagnagacaancntacgggncanatnngcacg

SEQ ID NO: 3095 - DNA, 145 bp, Zea mays
  misc_feature: Incyte ID No: 700161654H1
  unsure 64, 132, 143-144: a, t, c, g, or other
gggctaagaggcttgtggcgaaatatgggtcacttgtgtctgttgtctcatttgttggattgtntatctacctcgttgcgagcccgtcgaagagcagctcaaaaggaagcaagaagagacgttgatctactnatagttcggcnna

SEQ ID NO: 3096 - DNA, 237 bp, Zea mays
  misc_feature: Incyte ID No: 700161657H1
  unsure 66: a, t, c, g, or other
gaaagccttggagatattgttgaggaactaataaagtcagggaatgctatagaggctatatatgtngcccatgaggctgatttgcttgggaaatttccacctgtgcctctcttcaaatcttatctgcagaattccactgataaggctcaggcagtgttgaaaagtggaagacattccagttctgcacttgaagaggcaaacaacttggagggcaatgcatacaggtccgtcataagg

SEQ ID NO: 3097 - DNA, 237 bp, Zea mays
  misc_feature: Incyte ID No: 700161658H1
gtatgatgaggcttgttcagttctagaagaagatgggaaggaacagatggcttttgacttgtaccgtgccgcagcagctttgtatatcaagatggagaaatattcagatgccgctgctttgtttttaagacttggttcagctgctgataagtgcaatgccatcaatagccaatgcaaggcctatctgagtgcgatcatcatctatctttacacacatgattttcagcaagctcaaaa

SEQ ID NO: 3098 - DNA, 236 bp, Zea mays
  misc_feature: Incyte ID No: 700161660H1
agcgaatgatataaagatagctgtagcatcggcaaacaaaagtggtgcaatgagctttcaagagttgaaccagaagaaataccgcacgcccctaattctaggaatgggcctacttgtgttgcagcagctgagtggaataaacggtataatcttttatgcaggtagcatcttcaaagctgcagggctcaagaacagtaacctggacacatgtatacttggagtgattgcggttcttg

SEQ ID NO: 3099 - DNA, 235 bp, Zea mays
  misc_feature: Incyte ID No: 700161661H1
  unsure 166: a, t, c, g, or other
acacaaagctcttgagctccaaatctagcagcaccactctagctatagcaagctagagctatacacacgactttgtgcaacaatcaccgacacacacagctagagctagagatggcggcgggaaagctggggcagcagctgatgacgaggctgcacctcgcgaggncccgatcgtcggcgacggcggacgtgccgcggggccacctggcggtgtacgtgggcgaggggcggaacg

SEQ ID NO: 3100 - DNA, 231 bp, Zea mays
  misc_feature: Incyte ID No: 700161662H1
  unsure 83, 86, 127, 168-169, 176-177, 179, 185, 188, 191-193, 200, 211, 213,215: a, t, c, g, or other
ggcggaccaggtaagcagcagcaggaaccctagcaccgccgcatccgcagccatgggtatcgacctcgttgccggtgggaggnacnagaagaccaagcgcacagcgccgaagtccgacgatgtttanctcaagctccttgtcaagtctaacgtttttggtcaggaggnnccagagnnantttcanggngtnnntttcaanagggtctttcngngnaaaaccatgggcccac

SEQ ID NO: 3101 - DNA, 235 bp, Zea mays
  misc_feature: Incyte ID No: 700161663H1
gtcgtcgacggcgttcagccaactgttcccttccgccgctgcggtatcccccgtccctcgctgcgtctccctgcagctcttctgcgccagggtggagttgtccctggatggaggagaagatgccgccgcatggccatggtgcgcgcggcaaccgcggatgctgcggcgcccgcctacacctccgattccctcatcctctacttcaaggcggagggcaccatggaggagagggcca

SEQ ID NO: 3102 - DNA, 234 bp, Zea mays
  misc_feature: Incyte ID No: 700161664H1
  unsure 96, 207, 228: a, t, c, g, or other
cccggtgcacaagagcgtgccggtgcttctccacgccgggcgcgccataaacgagtcccaggtcatcctgcagtacatcgacgaggtgtgggcggngacggggccggacgtgctgccggccgacccctacgagcgcgcggtggcgcggttctggggcgcgtacatcgacgacaaggtggagtcggcgtggctggggatgctgttcangttcgcgaacgaagaagaaanggcggc

SEQ ID NO: 3103 - DNA, 235 bp, Zea mays
  misc_feature: Incyte ID No: 700161665H1
  unsure 231, 234: a, t, c, g, or other
cgtctccgtgtacgcgttcgagggcatcggcatggtgctgccgctggaggcagaggcggcgaacaagagcaagttcggcgtcacgctcgggctgtccatggcgttcatcgccgtcatgtacgggctgttcggcgtcatgggctacgtcgcgttcggcgacgccacgcgggacatcatcaccaccaacctcggagccgggtggctgtcggccgccgtgcactggggctctgnatna

SEQ ID NO: 3104 - DNA, 232 bp, Zea mays
  misc_feature: Incyte ID No: 700161667H1
  unsure 31, 45, 72: a, t, c, g, or other
cctttccagaaccctctggtctccgcgtgcngcggcgcgatttcnttgcttctcccttcgacttcgagagantgttgattattctagagccagatccgggtaacagattcgaggttgcgcccgccctgttcggcttcagatatggggaacactacatctgtgcaagctgaggcttcagattcagcgcagaaacctgccacaacatctcctgcacctgggtcaaagccgaaaa

SEQ ID NO: 3105 - DNA, 152 bp, Zea mays
  misc_feature: Incyte ID No: 700161669H1
  unsure 138, 140, 147: a, t, c, g, or other
caaaaagcttggccgttgcatttccccccgagaagaagcccggatacttataggttaattagaactaatttatgatatacattcagactaattattctacacatcaaaggtatttatgtaatgcggtacaatatatananccggttnacaaa

SEQ ID NO: 3106 - DNA, 231 bp, Zea mays
  misc_feature: Incyte ID No: 700161671H1
aagctgcagggcgatgtgaacctcaaggaggttgaaagagtatgcaaggctgcgtgttggtgcattcaggaaaacgagtctgctcgaccgaccatggccgaggtggtgcagtttcttgagggcctctctgatctcggtatgccaccactgccaagactgctcaatgcggtcacaggagggtcaccgacatgactgtgacatttatagtcttgcctcgaatttagtttagca

SEQ ID NO: 3107 - DNA, 233 bp, Zea mays
  misc_feature: Incyte ID No: 700161672H1
ccttgatggcccatcgaagaccgatgcatcaataatccagtgtcaatgaccccgattgccattatttctgaaagggaaatgtgccctttggccatttctaagtattttggtgattgagtgccaacacaagtgtttttgtgttgatctatgcaatgtggtggacaaagtacaaatcatgtcaaaaggtatgtttctagacttagtacattattttatggactaatgtgttgtgt

SEQ ID NO: 3108 - DNA, 231 bp, Zea mays
  misc_feature: Incyte ID No: 700161675H1
gactgcctcaccagccgctggctcgtgctcgacgggcgcaccatggagctctccctcgcgatgatcccgtcgccggccggctactgggaggagcacgtcgcagtcgtggaggccccggacgggaagcttggcgtattcgcgcacggtttccaccaccccgacggcaaagccaatctacactactatacgatcgtgcacgacaaggaagccgccggcgacacgaagcggtgg

SEQ ID NO: 3109 - DNA, 230 bp, Zea mays
  misc_feature: Incyte ID No: 700161677H1
taatgagccacgctgccattccgatccatcaggcgacacattgcaggcatggatagaagagatggcgtcttatgtgaaggatatagaccctgtgcaccttttagagatcggtgttgaagggttttatggtccgtcgactccagaacttctgcacgtgaacccagatgcttattctggaactattggaacagattttatcaggaaccatcatgcactgggaattgatttgg

SEQ ID NO: 3110 - DNA, 200 bp, Zea mays
  misc_feature: Incyte ID No: 700161678H1
gaatgaaatacatggtagtgagaagcaatcgctctctgtggcaccaccaagtgcagattcagtccatatcttgctgaagcaagctcttcgtgctgatgatagtgtagcactgttaacttgcttgtataatagagatgagaaggttattacgaagtctatatcactcctaacaccagcagatgttgtgaggttctcatttt

SEQ ID NO: 3111 - DNA, 231 bp, Zea mays
  misc_feature: Incyte ID No: 700161679H1
  unsure 6, 126: a, t, c, g, or other
caaggnaagctgaagcagctgagaagcgagctgatgatatcgcttcgggagcggcgcagatgaacggccgcgagctgttccaacatgagccctgggtgttcgacaacaacatttactgagatcgtntcgggctactgttcctgcattagtccaagctctagcggtggtttcattttgtactgctatatcagctttgcgaaactgtggattttatttcaccgtttctaagat

SEQ ID NO: 3112 - DNA, 146 bp, Zea mays
  misc_feature: Incyte ID No: 700161683H1
  unsure 3, 9-10, 46-47, 50, 55, 59, 67, 70, 79-80, 85, 90, 107, 129: a, t, c, g, or other
ggncccgcnnggctggccttcgttgccagggttgtccggtacggcnnatncgggnttgnccgggganacncccttgttnncggtntttcngttcaaacttcgttaangagcaaccagggcaacggattnccccggacaaagggaaa

SEQ ID NO: 3113 - DNA, 173 bp, Zea mays
  misc_feature: Incyte ID No: 700161684H1
  unsure 117, 129, 138, 145-146, 152, 155, 159, 163-165, 172: a, t, c, g, or other
gcggttgtctccggcgagaccgccgcgcacccgggctacacgcacgctgaggaggcatgcagcggtgtgctagaggcagaggcggagaaagcaacggtgctggtgcctgcgccagancggccgaagaantcgacggcnggcggannattganatnagcncatnnnacggggng

SEQ ID NO: 3114 - DNA, 224 bp, Zea mays
  misc_feature: Incyte ID No: 700161685H1
  unsure 110, 119, 131, 133, 137, 146, 148, 173, 176, 203: a, t, c, g, or other
acgcggcgcacccggcgcacgtggccgccgtgcaggggcacgtcctccccaacgcgctcgacatcaccgccgtcgactgggtcaacgccgcgccgctcccgtcccccgtngcccccggnagcgcgtgcgcntnacgntggcaaagntnaagaaagggttgaagttgcgcaatngtngagaaagttgccgcggccacccaagcnccggggaaccaaagtgacttt

SEQ ID NO: 3115 - DNA, 129 bp, Zea mays
  misc_feature: Incyte ID No: 700161686H1
  unsure 126: a, t, c, g, or other
tgtagcttcacatgtacagtaaaagcaggttggttcttgcatacagttgttgtaactagtgcgttcagggcattgaagataggatgacagtagatcacagacgttgctgggctgcgaatagcgtanggc

SEQ ID NO: 3116 - DNA, 227 bp, Zea mays
  misc_feature: Incyte ID No: 700161687H1
  unsure 36, 133, 167, 171, 183, 222: a, t, c, g, or other
atcggttccgttccgtcgcagaaatagaaaaaaaangctttcttgtcccacagggcagggagaccgggagagcagtctagtgattagttgatcaccagacgtcgagacaccatgagctcccgcatggccggancagcgcttctgcgccacctaggcccacgcctgtncgcngccgggcctgcngtgtccgggctcaccgcgaggggcggcatgtccgcggcnacgag

SEQ ID NO: 3117 - DNA, 227 bp, Zea mays
  misc_feature: Incyte ID No: 700161688H1
ctccagcgctcctccgacggctacgacaccacacgaaccgggtgccaaaacctctccggctgccacgacggcatgtacttagggcactagctcttctctgctagacacgttagcacactgctacacctcccattgtacacctggatcctctccttacgcctataaaaggaaggtccagggccctcttacagagggttggccgcgcggggaaggacgagacggcgctc

SEQ ID NO: 3118 - DNA, 229 bp, Zea mays
  misc_feature: Incyte ID No: 700161689H1
  unsure 37, 97, 177, 211, 216, 226: a, t, c, g, or other
tgtggctccagctgctcctgcggcagcttcatgcaantgcatgtcccctaacgtggagaccgccgccgccagcagcatcaagaccacggtcctcgcngcgccgaccaccaaggccagcgccggcggcttcgaggcggccaccgagggcggcggctgcgactgcaacacctgcaactncggcaccagctgcggctgctcctgctgcagctgnaactnagccggtcangga

SEQ ID NO: 3119 - DNA, 224 bp, Zea mays
  misc_feature: Incyte ID No: 700161692H1
  unsure 2, 93, 101, 126, 180, 185, 208: a, t, c, g, or other
cnggtgtgaggtcgcctcctcctcggcaccgtcggcggctggaccccaggcccgcccggtgggcccagaggaccgtggtcatcccgccacagngccgcatngccacctcatcaccaacaagattgnaaatgagatagggaatgacctggccgacttcaagtgtggcatggcgcatctgtncttgnagcacacaagtgcgtcgttgacnattaatgagaactacg

SEQ ID NO: 3120 - DNA, 223 bp, Zea mays
  misc_feature: Incyte ID No: 700161693H1
gcacaaggtcaccgctgtccccgccgacgaagaagagatctgcggtgccactttcaaggtggtggaagggtctactgtcctgacggcgctgcactgatcgatcatcatcaggcggaggcgatgcgacgatacagaactttgtacatgcgtggtgggtgtaacatagtggctggcaacaagccatgctcatgcaaaccgatgaatctatctctgtatcatgcat

SEQ ID NO: 3121 - DNA, 61 bp, Zea mays
  misc_feature: Incyte ID No: 700161694H1
  unsure 27, 44, 48, 53, 59: a, t, c, g, or other
ggatactgtggccattctacccaattnatggttggtttgaggantttnatatnactgantt

SEQ ID NO: 3122 - DNA, 266 bp, Zea mays
  misc_feature: Incyte ID No: 700161701H1
gtaaatcatcacttaacaagatggactcccgcagccttgctgtggaatttgcgcctttgatcatgtggcggcaaggtgacactggcacagatttgcgtaaccacctcaagtttaccctgaaaccgcctccaaaaattgtggatacaacatcaaatgctgccacatgggacctgttagatgaggatgacgaggatgcttcatcccagatccccttagacgatgcttcaccaccagactacagtccatgaggtatccagtgtctgatc

SEQ ID NO: 3123 - DNA, 242 bp, Zea mays
  misc_feature: Incyte ID No: 700161702H1
  unsure 77, 116, 144, 170, 177, 191: a, t, c, g, or other
ctaatctgttggtggaatgattttcccagtaatttcctggacaagcagatcaccgagaaccatctaccttatgaganatgatgccttgtatggttcagtatagttcttgtattgcnggtttaaattaattcctgtatggcagtngcactaaactgaatgggcattgcacnttgaganattctccaatggtnggtttaaaacccaggggacggttttggaagcatcctgttaaaaccgggtgc

SEQ ID NO: 3124 - DNA, 258 bp, Zea mays
  misc_feature: Incyte ID No: 700161708H1
  unsure 51, 246: a, t, c, g, or other
ggcgcaaccactggctgaggtacgccgtgacaagaaccagaagaaggcggngcccttctggatggtgctggtcatgttttcagtttttggtgccgtgatggcgttgcccctaatgcaactttgacaacaataaagaccatgaggacgtgtgataccggggcagtaattttgtatagttttccattggttcgtgagtgtaacaaagttgccccctagacttacctaccaccttggagtcatattgangaacttgtgatg

SEQ ID NO: 3125 - DNA, 257 bp, Zea mays
  misc_feature: Incyte ID No: 700161710H1
gagttcagagactgcactgtcatcactgtcgctcaccgtatacccactgtcatggactgcagtatggtacttgcactgagcgacgggaaactggtggagtatgacaagcctacgaagctcatggaaaccgaaggtctctcttccgtgacctcgtcaaagagtactggtcgtacgcatcgaatgggaatatctagaagccacctccaaactacgaccgtttgcatgtttccactcgctgcatcctcttgaaaggagat

SEQ ID NO: 3126 - DNA, 253 bp, Zea mays
  misc_feature: Incyte ID No: 700161711H1
  unsure 155: a, t, c, g, or other
aatggatgtggctctaactctgcttctagaccggtgatggttcagcttagaagcaggggatcttcatcatcagaataaaaacgtgtgttgttgtgttgctgtgtctacgccactagtatttctgttgttacttatgttctaggtaaactgcgcancagagcagagctgaagaatatgtactgcttgctcgctcttgtgtggttgtgtctacccctactagcattcagctttgttgaagtaaactgcgaaccca

SEQ ID NO: 3127 - DNA, 198 bp, Zea mays
  misc_feature: Incyte ID No: 700161713H1
gtccacagcttaaggagtctctttccgtgaatgtcatgttagagtttttggttatgagttggatcagcaattcgattgagcgttgtcaaagccagagttaccaatatgttccctgtgaacccatttcaaactttatcaagcacgggtgtgctcaggatatttttgccatgaatgatatggaatatctatggtgtaaaa

SEQ ID NO: 3128 - DNA, 256 bp, Zea mays
  misc_feature: Incyte ID No: 700161714H1
ctgaatagttctttacaagttcataagccgcccattaagtgtgcagcctatggagagggcacattccttacaccagcaaatcgttctgatgcctgtgtgaaattctctgctgttgatgaaaatggcattgtccatatgatgttgtgccgtgttataatggggaacgtagaaatagttcaccctggatctaagcagcaccaacctagtagtgactattttgatagtggagtagatgaccttaaaaacccacaacatt

SEQ ID NO: 3129 - DNA, 259 bp, Zea mays
  misc_feature: Incyte ID No: 700161715H1
gttatatttgcgtgaccaaaaccacttgacttatcccaccatgatcatgatctaacccaaccaatagagtcatgatggattgcataatctgcctatccccacctaacatcaaacaaactttggacctacatcatgtagtctatctcatccatatttatcttaaccatattcccaaccgatgatatacactaaccatgaatcaatgagaccaagaccagaaaaggacaaaatcaacctcatcaaggaaggagagaagtca

SEQ ID NO: 3130 - DNA, 261 bp, Zea mays
  misc_feature: Incyte ID No: 700161717H1
  unsure 42, 98, 118, 200, 225-226: a, t, c, g, or other
gcggccacagcctcgcgtcgtcgccccacagccacgcgagcnttcgccgatccgcgagcgcagatcgccgaagccaggcggcggagagggagctcgangcggcggaggaaggcgttcnccacagtcgctgatttccctggggaagagatgggtctctctttgggaagtgttcagccgcctttcgccaagaaggagatgangattctcatggtcgggctcgaagcnncggtaaaaaccaccatcctttaaaagctaaggtgg

SEQ ID NO: 3131 - DNA, 260 bp, Zea mays
  misc_feature: Incyte ID No: 700161718H1
catccgctctccccaaatttcgaaagctctatggtgtgattgaagacgacctgcatgccgatgagaccatatctgttttagtaggaaacaattacaacacctacacttttggtggaaagaagagcatagtactgtcgactgcgtcctggctaggcggcaagaacgacttccttggacacgcttatattgtcactggttcgttgagcatcatcatatcgattctctttgcactgatccatgtgaagtaccaaggcggaagg

SEQ ID NO: 3132 - DNA, 260 bp, Zea mays
  misc_feature: Incyte ID No: 700161719H1
  unsure 99: a, t, c, g, or other
gcagtgctggtgcggcgagtgcaccagctggtcgggcgtgtggacctgcgacgacctcctcaccaagtgcgccgccacctgcaagaactgcgtccccgngtccacggacaagggcaccaccaagtacaggtgccgcgacttcctccccgaaaactgcggctgcaagatccactagactcatccacagcggcacagccgatggatccttccatgctcctccgtccgtccgccttgctataagcaggcaggcagccaccaat

SEQ ID NO: 3133 - DNA, 255 bp, Zea mays
  misc_feature: Incyte ID No: 700161721H1
  unsure 147, 160, 164: a, t, c, g, or other
gtggacatgagtcatttgttgctggttcttctgcctttgttttatgttactgcattgctatttctctaaactagcttgtctaaatcaaagggtatttcctaagtctgtttaccgcagaagatattgtaaaatcatatcctttacagnaaaggtctgcaanaaangtgacatttccacttgtctggacaaacacctgctgtagccatcctctctaccgcgagtcagagttgattgaggaaattgtgcagggtgaga

SEQ ID NO: 3134 - DNA, 255 bp, Zea mays
  misc_feature: Incyte ID No: 700161724H1
cgaggatgaacctcacagatgacggctagaaaatactttcacatggtttagaagcctatgccatgctgctggttcacctaagcatttgttggaaggtaacaccaagcagccgtgaacagccacggtcacctgaggagccttctcgcagtgtctggatgtggttgtttgagcctctgaggggaaatgccctgcgcgcttctgtgcttctcgtgtttctacctggcaaccacgtgcacataattttaccagaatccg

SEQ ID NO: 3135 - DNA, 253 bp, Zea mays
  misc_feature: Incyte ID No: 700161725H1
  unsure 96, 155: a, t, c, g, or other
agcagctccaggaagggccaaagatcaggcgcgtgggcatggtcacgcaggggccgcccgcgcggagccacagcgagctggtgagcggctcggggnagaggatcggcgaggtgaccagcggagggttcagcccgtgcctgaagaagaacatcgcnatgggctacgtgaagtcgggaatgcacaaggctgggacggagttgaaagtggtcgttcgcgggaagtcctacgacgccgtggtcaccaagatgccgtt

SEQ ID NO: 3136 - DNA, 210 bp, Zea mays
  misc_feature: Incyte ID No: 700161727H1
cacggatccagaggccagagcacaccagctgagctcgagcgagctctagtcgttttagcaccggctccggtgtcacccatggccatgaggggagcggcgcacaggtggcacggttcgccatggggccacacgtccctcacgttattgcgcccgctgagaggagccttcatgcgtccgccgggagcaagaagatcgtgggcgtgttctaca

SEQ ID NO: 3137 - DNA, 251 bp, Zea mays
  misc_feature: Incyte ID No: 700161728H1
  unsure 191: a, t, c, g, or other
gggcgagtgtggtggcgtcctgagcctccaccgggacgtgcagacctgcgggtaccaggacgtgcaggtgatgtggaacatgctgagctcggagaaggaggccgcggccggcgcgctgccgaagccgccgcggcggaagcgaccgtcgtcggtctggaggctgccgctctggcccgtccggtcgccccgcnccgccccggggtgaggcggcggcaacagcagcatcgccgacggaatggtactcctggttg

SEQ ID NO: 3138 - DNA, 253 bp, Zea mays
  misc_feature: Incyte ID No: 700161729H1
  unsure 100: a, t, c, g, or other
gggcaagatgcagaagccgctggcggacctgctcaaggagcacaacctccccgtgggcctgttcccgcgcgaggcgaccaactacgagttcgtgccaganacgcggcgcctgacggtgtacatcccgtccccctgcgaggtcggctaccgcgacggctccgagctgcggttcgacgccacggtgtcgggcacgctgggcgagggccgcctcacggaggtggaagggatcaagaccaaggtgtccgtctgggcc

SEQ ID NO: 3139 - DNA, 252 bp, Zea mays
  misc_feature: Incyte ID No: 700161730H1
cacagattatagaatgcaggcgagtgctgaaatggacatatgcttatggctactatctggatgataaggtcaagagtgatttttttgagtatctgcaaggtgaggctgagtctggtttggaacgtctgcatcagtgcgctgagaaagacttgcacaattttttgactcctgtgaaatttgagagcactgaaacgacgacccctacagtggctgaatttggtgaattccgggtgaagcttgctgggctcacaa

SEQ ID NO: 3140 - DNA, 256 bp, Zea mays
  misc_feature: Incyte ID No: 700161731H1
tgcacgccgacccggccgacctcagcctggtggtcaaggacgggtaccagtggcgcaagtacgggcagaaggtcaccaaggacaacccctgcccgcgggcctacttccgctgctccttcgccccggcctgcccagtcaagaagaaggtgcagcgcacgcacgaacgaccccaccatcctggtcgccacgtacgagggcgaccataaccacggccagcccccgccacaggcgcaggcgccgcacgacggctccagcc

SEQ ID NO: 3141 - DNA, 256 bp, Zea mays
  misc_feature: Incyte ID No: 700161733H1
  unsure 190, 241, 244: a, t, c, g, or other
gattgatgcagccacgatacccaccaaggtgaagtacacgccccccaagcagccgcactacaaccaggacaagacccaggagttcgtcatcaagatcctccagtttttggtccccctcgcaatactgggtctggccgtcgctgtaaggatgtacaccaagtcggaatctgcctagtctcttgtcatcaangcttcaaacatcattcacaactgaataagttagtgttgaaatgctgcaagntcntaatttctgaac

SEQ ID NO: 3142 - DNA, 97 bp, Zea mays
  misc_feature: Incyte ID No: 700161734H1
gccttgtcttgtgtgaacctgcttatctcgtgctgaacatcgttatgcatggaagtacttatcttttgttctgctaaaaattaagtgttctgcgtct

SEQ ID NO: 3143 - DNA, 250 bp, Zea mays
  misc_feature: Incyte ID No: 700161735H1
  unsure 55, 185, 187-188, 194, 197, 224, 238, 242, 246, 249: a, t, c, g, or other
ggcgaacgtcgcggcggacgaccccggggccgtcctcagggtgttccggcagaangaggagcgacggcgtggaccccgacctcgtcacctacaacacgctcatcttcgggctcgcgcgcgccgggatggtcgccaaggccagggctttcctggacgccatggccgcggagggccacctccccgangnngtaacntanacctcgctcatgaacgggatgtgcgtnagggcgacgcgctngggngctnaant

SEQ ID NO: 3144 - DNA, 253 bp, Zea mays
  misc_feature: Incyte ID No: 700161736H1
  unsure 20, 47, 52-70: a, t, c, g, or other
gaggaggacaagggaaaganagcctaccggctcggcggctccggctnacctnnnnnnnnnnnnnnnnnnntctcgcgtgccgccggcggccaccaccatcactgccatgatcagcatcctcgcgcaggagcgcctcctcgggttcgccctgggttccgtctccatcggcggcttcgtcctccaccagcgccgggccatctaccgttcaatcgctgaagccgacgggtcgccctacttttaccagcctggtgaa

SEQ ID NO: 3145 - DNA, 250 bp, Zea mays
  misc_feature: Incyte ID No: 700161737H1
cgactgttcaatctttctgctccctaagacacactcccacgagatccatattgagaaatcggttgaaggtcctcactgtggtttgattccgatgggtggaccgtcagctaccacaacaaccacagggctccgatggaatttagataacaccaacatgatgtatggtggattgataagcacatctaacatcgtggatgacgataaagtaacggtgacttcagattctgatctggtttggaccatatcgctt

SEQ ID NO: 3146 - DNA, 251 bp, Zea mays
  misc_feature: Incyte ID No: 700161738H1
  unsure 115-117: a, t, c, g, or other
ctcccatccccgcacttcaccggcctcctcctccttcccgtccatcgccgtcgccggggcgccctacaacttcaaaatggcggctaccgccaccgccatggctatagcaactatnnnccccgccgctccgatcccatccgcgcccttcccatccctccccctcggcctccgcctccgccctcaacccctccttttcgctgcttcccgccgccgcctcctccatgttcccaaagccgcctcctgggacgaat

SEQ ID NO: 3147 - DNA, 249 bp, Zea mays
  misc_feature: Incyte ID No: 700161739H1
  unsure 199, 232: a, t, c, g, or other
gcccgtgtacccgccgccgcacctcgtgttccacgcgctcaacgccaccccgttcgaccgtgtcaaggcagtcatcatcggtcaggatccataccatggccctggtcaggccatggggttgtctttctcagtaccggaggggataaaaataccttctagcttaggtaacatttttaaagagctcaaaaaagacctaggntgcactgtgcaatcacatgggaaatttggaaanatgggctgtgcaggtgt

SEQ ID NO: 3148 - DNA, 249 bp, Zea mays
  misc_feature: Incyte ID No: 700161740H1
gtttgatgaagagacacttgtgaatgtgaacagcatcaagaggaataaaggaggcagccaaagatcaagtggttttagcaacgagtacattgtgataaccatattggttgctgctgagggagtacataaggtgccggttataaatagcagcaatgacttaaagacagctctacaaaagatgggtgccataccatcgcgcaaaatactggcagtcgaggtcctatggactccacaaaatgagaatgaccc

SEQ ID NO: 3149 - DNA, 247 bp, Zea mays
  misc_feature: Incyte ID No: 700161742H1
gttcatcaagtcccacggcggcatcaccaccgagtccgcgtacccgtaccacgcctccaacggcacctgcgacggcgcgcgggcccggcgcgggcgggtcgtggcgatcgacggccaccaggctgtgccggccggcagcgaggacgcgctggccaaggcggtggcgcaccaaccggtgtccgtggccatcgacgcggggggccaggcgctgcagttctactcggagggcgtgttcacgggcgactgc

SEQ ID NO: 3150 - DNA, 246 bp, Zea mays
  misc_feature: Incyte ID No: 700161744H1
  unsure 2: a, t, c, g, or other
cntcccatccctccccctcggcctccgcctccgccctcaacccctccttttcgctgcttcccgccgccgcctcctccatgttcccaaagccgcctcctgggacgaatccgtccccgaggatggtggagatgcggaggaatccgttgccgctggggacgacgaggacgaggacgagaagccgcggcccgagccggtgtcctcctccgagttccagttcgcggcgccacccgagggctacgtcgagcc

SEQ ID NO: 3151 - DNA, 246 bp, Zea mays
  misc_feature: Incyte ID No: 700161745H1
tgacactttagcagctaaccaatcaacttgtggaacacatggctagcgaagttgttctttcgctgttgttgaagcgttggtcaagttctttattcgtgcaaccatgaatagaatggaggtcaatcacatgaagtgtagagcgtacggactgagtacgaaccatcggaacctgctgtagccattatatataactaggattacgttacttatctatctattggttaaaataatagggacgatgaattc

SEQ ID NO: 3152 - DNA, 248 bp, Zea mays
  misc_feature: Incyte ID No: 700161746H1
cctgcgcctgcgagctcaggagatggttcccggaggaaagatggtgttctccctccttgggcagcgccccgacgacaaaccggagaacgccctccagcttttcgaatttataaatgccgtcctacacgaaatggcgtccaagggtttgatcgacgaggagagactccactctttctacataccggtgtatgggccatcagagaaagagctgagggagatcgtagaagctgagggctcgttttcgatcg

SEQ ID NO: 3153 - DNA, 248 bp, Zea mays
  misc_feature: Incyte ID No: 700161747H1
  unsure 8, 12, 70: a, t, c, g, or other
cggaacgntggncaagaaacgtagggaagagatggagaggcttgagaaagagaagcaggctgatatcaanagctacaagggtctaatggtccaagagaagatgacttccaacaagcaaatcgcttctggcagcaagaccctgcaggaacttgaagaagactttatgtgagaggcggacattataaatgccatgctgaagatttccttgaactgcttctgtcgaagcagaaggggtaccacaggcttgt

SEQ ID NO: 3154 - DNA, 229 bp, Zea mays
  misc_feature: Incyte ID No: 700161749H1
  unsure 116, 162-163: a, t, c, g, or other
cctgcgacacccatccgccgccacgccatggccaagtacaacgtggtgcagaagaacaagcgccagtgcaatcaggaccgcaagcgcgccgccatggggagcccgggaccggcaanctcaagcagcggaccgcgcccgtctccatgtccggcaagcggaagnngaagctcgagcgccgccttcaaccggaagcagaaagaggctgcgatgattaagggcgctggaaaaa

SEQ ID NO: 3155 - DNA, 229 bp, Zea mays
  misc_feature: Incyte ID No: 700161756H1
ctcctccgcgccggccgcaagaggttcaagcgcgcgggttcgtcttccaacgcctccaaggcgaagccctgcccctcgagctcgagggcaaggccggcaacaacgaacgcgcgtcgcccagccctcccccgacgcaacaacgagaggcggaggagctgcagccggtgccgatggtcgtcgagccagaacacggcgaggagtccgccggcagccacgaccaccacctgca

SEQ ID NO: 3156 - DNA, 229 bp, Zea mays
  misc_feature: Incyte ID No: 700161758H1
  unsure 2: a, t, c, g, or other
cncgccccacagctcaggaatccccacagctcacacaggcacacagctcctcttggcggcgcctctgacttcgtcgcccttctcctttttcgtcgcccttctcctttttcgtcgccttcgatcggcggctgcctccttcctccacttccgtcccttcaccgagccgccgccgccactatgaagggacccggcctcttctccgacatcggcaagaaggccaaggatctac

SEQ ID NO: 3157 - DNA, 228 bp, Zea mays
  misc_feature: Incyte ID No: 700161760H1
ggcaacaacgccacgctcttcaactccggcgtcatggtcgtcgagccctccaactgcacgttccgcctgctcatggaccacatcgacgagatcacctcgtacaacggcggggaccaggggtacctcaacgagatattcacgtggtggcaccgcgtccccaggcacatgaacttcctcaagcacttctgggagggcgacaggaggccatgaaggcgaagaagacccagc

SEQ ID NO: 3158 - DNA, 231 bp, Zea mays
  misc_feature: Incyte ID No: 700161764H1
  unsure 16, 34, 88, 125, 156, 185: a, t, c, g, or other
cacgattctagatganacccttgactcacatgcnaattcttatgagagtatgcaacttgcagaagcagtcgaaaggtgggatgaaacngcagtctctctactcccagaatacatgaaggatttcnacatgtatttgttgaagacattttcatcgtntgaaaatgagttaggaccagacaagagcnaccgagtgttctacttaaaagaagcggtgaaggaattagttcggga

SEQ ID NO: 3159 - DNA, 217 bp, Zea mays
  misc_feature: Incyte ID No: 700161765H1
  unsure 6, 10, 27, 38, 62, 70, 73, 88, 150, 158, 197, 207, 214: a, t, c, g, or other
gctgantgtngcctttaaatgtttggnactgttgtgancgtgatgtcgaatatccatatganctgttganggnttacttgtgtaagcngagtattcccggaggaactattagtcgaatggacagtttgcccagcgctgagaatgtgaccnagcatgtnctttatttgaagaagatataattcatttttcaaaaaaanaaaaaaaaanaaaaagnggg

SEQ ID NO: 3160 - DNA, 217 bp, Zea mays
  misc_feature: Incyte ID No: 700161766H1
  unsure 85: a, t, c, g, or other
atctatccaagcaacaaacttggcattcttgcctgttcttaattattgccaggacaggagaaacaaagatgaggcctcagctganactcgtcggcactctggctgttctcgccatcctcgcagctctcggcgaaggctcgtcgtcctggccctgctgcaacaactgcggtgcttgcaacaagaagcagccgccggagtgccagtgcaatgacgtgtc

SEQ ID NO: 3161 - DNA, 219 bp, Zea mays
  misc_feature: Incyte ID No: 700161767H1
  unsure 38, 42, 69, 71-90, 203: a, t, c, g, or other
aacaaactcaccaacaaagtgacctgaaactgggagcnagcnaccgagggcgagagccatggcgaactncnnnnnnnnnnnnnnnnnnnnctcctggacttagaggggcactacgccttttacggcgcctaccacagcaaccccgtcaacgtgggcatccacgagctcttcgtgtggcccatcttcctcaccgcgctcatgcncctccacctcaccgcc

SEQ ID NO: 3162 - DNA, 220 bp, Zea mays
  misc_feature: Incyte ID No: 700161769H1
  unsure 152, 207: a, t, c, g, or other
gatggttctccccatcgacgaccacatggtccaccggggccacggcgtgttcgacacggccatgatcctggacggcgccctgtacgagctggacgcgcacctggaccggttcctccggtcggccgcggcggcgcgcgtgggcacggccccgntcccgcgcgaggcgctgcggcgcatcctgatccagatgaccgccgcctcgggctnccgcatgggctcc

SEQ ID NO: 3163 - DNA, 220 bp, Zea mays
  misc_feature: Incyte ID No: 700161770H1
  unsure 10, 120: a, t, c, g, or other
cgatgcaggnatgggagccatcatctttgtgcccatcgtcgtcttctcatggttccccttcgtgtcaacattccagtcacgtttcctcttcaatcaagcgtttagtcgaggtctggaganctccctcatccttgcagggaacaaggcgaatcagcagatttgaaaggccctgccgcatccatcgtatttttctgttgtatattctgggaattactgagag

SEQ ID NO: 3164 - DNA, 221 bp, Zea mays
  misc_feature: Incyte ID No: 700161771H1
gtgcgacccctgcaactgcggcaagtgagctaggtgctccaccctgcaggccggccggaggaagctagctaattattataagctaaataaagtatagcggcgtcgctgtgtgtgtttcgagtcagtcagtcagttagttgcgtgccatggctggcatgctctgagtctgagatgatgatgatgcctgatggcggcgtcgtgtcctgtagtcctcccctgcc

SEQ ID NO: 3165 - DNA, 221 bp, Zea mays
  misc_feature: Incyte ID No: 700161772H1
  unsure 125: a, t, c, g, or other
gaaagatgaggcagagatccaagtaggcagatcgagatggattgtggacctgatgacatgcgtgggtacatacatttcttcggatgcgttggtgtgcctgtggagagatgtcaacctgccatggngtcacggtccgccatcagttgaacgtcttgcctgcacttcagtaggccacttttcatggttctagttgtatttgaatccagcgtttgccactaaga

SEQ ID NO: 3166 - DNA, 221 bp, Zea mays
  misc_feature: Incyte ID No: 700161773H1
  unsure 109-110, 133, 139, 151, 184: a, t, c, g, or other
gcgcgcgcgcgggcacggcgccgggatcctcgtgtccaggttccccaaggacaccagcgcgtccttcacgctacgcgaccccgccgaggtcaaggagttcctgcgcaanncgtcggcgccaacgacgacagcngatganccggcccgcgantcgtttccctttcccgccgtgaccagctccganccgcctgtgtcaagccgctaactcaacctcggctacc

SEQ ID NO: 3167 - DNA, 62 bp, Zea mays
  misc_feature: Incyte ID No: 700161774H1
  unsure 2, 41, 46, 49, 61: a, t, c, g, or other
tnataagacagacatgatgatgagcgtatgggcaaatatgncacanccnacacagcgtganc

SEQ ID NO: 3168 - DNA, 222 bp, Zea mays
  misc_feature: Incyte ID No: 700161775H1
ggacgcggacgccaccgccacgctcttcgaggtggcgcacggcatgtccccgtggagcttgacgaagaacgacgcgctgtacaacaagaccttgaacgacgggtgcgcggcggacagcaacttcgccatggacacgctcctgagagagccccgggccgcgggtatattccgcgggctcggctcgctcgtggacgtcggcggcggccacggcgccgctgcgat

SEQ ID NO: 3169 - DNA, 158 bp, Zea mays
  misc_feature: Incyte ID No: 700161776H1
  unsure 51: a, t, c, g, or other
ggtgcagcagccagcgcgcgcgtctctacaggaaacagagagcatccgagncccaaagctcgcagctttgccagcaaagcaagaagacagttgcggcatggagctggagcttgggctggcgccgccgagcgcgcgccgtcccacccccatgacgatcg

SEQ ID NO: 3170 - DNA, 221 bp, Zea mays
  misc_feature: Incyte ID No: 700161777H1
  unsure 2, 42, 53, 56, 100, 109, 117, 127, 159, 169: a, t, c, g, or other
cntggccagtacgggtgaaaatatcgtattcttttataagangaaaggtgacnacnaccgttacttggctgaatttagcactggaactgaaaagaaagcngcctctgancagtcacntatggcctancagcatgccatggttgtcgcctccagtgagcnctcacctgcncaccaaatccggcttggccttgccctcaatttgtcggtcttcttttatgaga

SEQ ID NO: 3171 - DNA, 200 bp, Zea mays
  misc_feature: Incyte ID No: 700161778H1
  unsure 61, 98, 116, 139, 144: a, t, c, g, or other
ggccgctcgcttttcacgtacacagttgcagttcagagagaagagaaagagaccgagatcncgccgatagctagcatcatggcgtccaaggcgctccncgtggtagcgctcctgcncgccgccaccttcctcgccgccnccgcnaacgagcaagccaaggcggccaaagaggagaataaggcggaggtccaagactggca

SEQ ID NO: 3172 - DNA, 125 bp, Zea mays
  misc_feature: Incyte ID No: 700161779H1
gagattatacatgaaccggtttatcttatagtgccatgtaattgccttgtgtgtcccagaaaactgagctgcccgtgtgcgataagtagaataagaggtgctaccccactgtttgctgtgttgct

SEQ ID NO: 3173 - DNA, 215 bp, Zea mays
  misc_feature: Incyte ID No: 700161781H1
  unsure 22: a, t, c, g, or other
caattttggttctgcgcgagtntttaaagctgattacatggaagaaaggtctttccccggttcatggggacattgctactgcacagagggctcgcatcgagctttgtttggagaatcactcaggatcagcttcgtctgataacaccgagaacagcagtttagccaagagtaatattcatcatgatagagcccacagttcagtagaatttgccctg

SEQ ID NO: 3174 - DNA, 167 bp, Zea mays
  misc_feature: Incyte ID No: 700161782H1
  unsure 96, 112, 117: a, t, c, g, or other
aacgccgatgtggaggtggtcgacttcgacctcgatgacgacgacctcatggacgaggacgccgggccggatccagcaccgccccccgcctcccgnctccgctccacatcgngggcnacgacgcgccgcgtaggaccaagggccgcggcttccgcgaggaccctaat

SEQ ID NO: 3175 - DNA, 216 bp, Zea mays
  misc_feature: Incyte ID No: 700161783H1
  unsure 45, 51: a, t, c, g, or other
gaccagggaagccatgacttacactatgtcacaccactattctgntttggnccttgacaggtcaaggtcagagccattttcagatgctgaaatcaagaatgctttcaggagaaaagcaatggagtatcatccagaccaaaaccaaaataataaagaggttgctgaggcaaaattcaaagaggttatggattcttacgaagcaataaaacgagaacg

SEQ ID NO: 3176 - DNA, 217 bp, Zea mays
  misc_feature: Incyte ID No: 700161785H1
  unsure 2, 32, 38, 187: a, t, c, g, or other
anagactgtgacaacgaaaaggttagcaaaanattggngtgtatattataagaccataaaactttgttgttccatattatagatcgggccacaaaaagttgtgtagctcattgaaattgttacagtggaaggcaacaaatggtatcactgacaaaagttttaatgagatcttaaaactcataaagangttcttttcagaggagaacaaattgtccgc

SEQ ID NO: 3177 - DNA, 219 bp, Zea mays
  misc_feature: Incyte ID No: 700161786H1
  unsure 115, 181, 184-187: a, t, c, g, or other
aagaagctagcgcctccctagctctcgttgtcagcaatggccaccaccgccgcgtccagcctcctcaagtcctccttcgcgggctcccggctcccttcggccacgcgcaccaccnccccgtcgtccgtggccgtggccaccccgcgcgccggcggcggccccatccgcgcgtccatctccnccnnnnccaccccgccctacgacctgacgtccttccgg

SEQ ID NO: 3178 - DNA, 217 bp, Zea mays
  misc_feature: Incyte ID No: 700161790H1
  unsure 36, 51, 87: a, t, c, g, or other
cacgggcggatcatggagcggcacgccatgtcagcnactctcctggcgaantgccgtaccagcacatcgctctgaacctggcgctgntcaaccagggcgcggtggtgaccgtgctagccaagatagaggagatgcagcgcggcgagacgcgggcaagccgccatgcgaaggcgtatatggaaggcctcgtgggtgtgctggtccggctaacgacgac

SEQ ID NO: 3179 - DNA, 218 bp, Zea mays
  misc_feature: Incyte ID No: 700161792H1
  unsure 32, 55, 135: a, t, c, g, or other
ggcggtcctgcgctacgccaactccgccggcngggcgccgggtcccctccccggnggccccaccatccagatcgactggtcgctcaaccaggcccgctcggtccggtggaacctgacggccagcgggccgcggcncaacccgcagggtcgtaccactacggcctggtgccggtgacccggaccatccgcctggccaactcggcggcgaccatcggcgg

SEQ ID NO: 3180 - DNA, 220 bp, Zea mays
  misc_feature: Incyte ID No: 700161793H1
  unsure 6, 54, 170, 178: a, t, c, g, or other
cctgancagagaggttgctggctttgctccttatgagaagcgtatcaccgagcntctgaaggttggcaaggacaagcgcgctctgaagcttgccaagagaaagcttggaactcacaagagggcaaagaagaagagagaggagatgatgggcgtcctcaggaagatgagancggctggnacgcacactgacaagaagaaataaagcatttcaagttcatga

SEQ ID NO: 3181 - DNA, 219 bp, Zea mays
  misc_feature: Incyte ID No: 700161794H1
  unsure 33, 40, 51, 93, 118, 203: a, t, c, g, or other
ggctactttggttatgtcaagtgtagttaagantggtggncttgcacctgntggtttcaactttgatgccaaattgcggagggaaagtactgntgttgaggacatgtttcttgtccanatctccggaatggacaccctggcacgtggcctccgcaacgttgccaagctgattgaggatggttccctagatgatcttgtccgcnagcggtaccagagctt

SEQ ID NO: 3182 - DNA, 220 bp, Zea mays
  misc_feature: Incyte ID No: 700161795H1
  unsure 68, 168: a, t, c, g, or other
caattattgaggtgtgcatgaggaaactggtattttatccagaagttgttggcttcctcgaagaaganaaagacgacttcccatatgtggaaacccgttattcctatggttcgccaccaaagctcataatgcttgacaacaagggtgaacagaaggagaccataaggnttgataactggaagcgagagcacattcggcagtttctcaaggagaaagtgaa

SEQ ID NO: 3183 - DNA, 222 bp, Zea mays
  misc_feature: Incyte ID No: 700161796H1
ttccttcaaggccttttgatgatggtgatatgacaacgaccgctgaagcagcttcttctggtggatttgcttgtgcagtcgcagctttagctgaacagcagcatatgcatggagagtcttctagcgcatcaccttgccaaacaataaggtttggcacccttagcagaccagacagatccactacacaggatctgagtgtagctgggagcagttcttcggact

SEQ ID NO: 3184 - DNA, 148 bp, Zea mays
  misc_feature: Incyte ID No: 700161801H1
cttttaggataaaaatgagcactgaagttttgcctatctgtatatcggcagcaaacgtttggtcatgtttgtttcaccttgtaatgtattgactcagatatgggattggtcattgtctcatttggtgtatgagtcaagtccagatttt

SEQ ID NO: 3185 - DNA, 292 bp, Zea mays
  misc_feature: Incyte ID No: 700161803H1
  unsure 59, 223-224, 238, 268, 285: a, t, c, g, or other
acgagcccgaggtgatcgccgtgaactccgtgttcgagctgcaccggcttcttgcgcanccggtgccctcgagaaggtcctgggcacggtgcgcgcggtgcggccgaggatcgtgaccgtggtcgagcaggaggccaaccacaactccggcacgttcctcgaccgcttcaccgagtcgctgcactactactccaccatgttcgattctctcgagggcgccggnncggctcggccagtncaccgacgcctccccggcagcggcggcggnaggacagtcatgtggangtgtacc

SEQ ID NO: 3186 - DNA, 281 bp, Zea mays
  misc_feature: Incyte ID No: 700161804H1
  unsure 218, 223, 243, 248: a, t, c, g, or other
gtgaagaacaccgtgacccaggtggccaagaaggtgctgaccatgaacccctcgggcgagctctccagcgcccgcttcagcgagaaggagctgatcagcgccatcgaccgcgaggccgtgttcacgtacgcggaggacgcggccagcgccacctgccgctgatgcagaagctgcgcgccgtgctggtggaccacgccctcagcagcggcgacgcgganggaancctccgtgttctccagatcncagtngaggaggactcggggtctgcccagagtgagcgc

SEQ ID NO: 3187 - DNA, 132 bp, Zea mays
  misc_feature: Incyte ID No: 700161805H1
gctgcattagttttggtgagtgggcagaaggctcaagagcttggccttcaagtccttgcaaggatcaaaggttatgctgatgcagctcaagctccggagctttttacaaccactccagcacttgcaatacca

SEQ ID NO: 3188 - DNA, 284 bp, Zea mays
  misc_feature: Incyte ID No: 700161806H1
  unsure 60, 75, 94, 125, 135, 137, 144, 146, 164-165, 180, 189, 192, 196, 203,205, 244, 280: a, t, c, g, or other
aagcatagttaagttacctgataaatttgaggttacaacctattgtgcttctgtggttancgtattagcaaatantttggcagatggcaagccnattgtgcctaggctctcacatggaatacccnacaggagggncnctttganantcttgcactggtctctgnngataaccagcccggnacgctctcnggngtancttaccngnttgctggcacaagcacaccggatggatatgactcttcantctcgagcagttgtactctatgcttggcagttcacnacat

SEQ ID NO: 3189 - DNA, 295 bp, Zea mays
  misc_feature: Incyte ID No: 700161808H1
  unsure 53, 113, 123: a, t, c, g, or other
ggattatctaccgattcttgccgcctgactctgaatggtcataccaacgagangaattttgtagggctatctgttcatgatggatacataacttgtggctctgaaaccaatgnagaggtttcntactacaaaactttccccatgccaataacttctcataggtttggttctattgacccgataactggacaagtgacaaatgaagacaaccagcaatttgtgtccagtgtttgctggagagggaagtcaaacatggtagtggctgccaactccagtggtagcatcaagtgcttga

SEQ ID NO: 3190 - DNA, 294 bp, Zea mays
  misc_feature: Incyte ID No: 700161809H1
cgttctagcctcagtgttactacagatgaaatcagttattcaacctgctgcgatgcagatttggcagtggatgaacatttacaatgcaccacgttttccagtgaagaagcgacagcctttctttctcaaagatggaaagaagcaatagccgccgatcacgtgaaacttgttgtgtcctgaaaactaaaggaatggcagaataaagaaattctgttgagggcaacagcatggaagctccggccgacttgtcgcggattccacagccctacaacatagtggttcttactagctgca

SEQ ID NO: 3191 - DNA, 108 bp, Zea mays
  misc_feature: Incyte ID No: 700161810H1
  unsure 85, 97, 102: a, t, c, g, or other
agtaaacgtggtgttgctctttcctttggcgcagatgtgactaagaagtttttacaggaaaataacctggatcttattgtccggnctcatgaagtanaggangaaggc

SEQ ID NO: 3192 - DNA, 294 bp, Zea mays
  misc_feature: Incyte ID No: 700161811H1
  unsure 97, 185, 189, 208, 223, 230, 238, 246, 255, 263, 286, 290: a, t, c, g, or other
caaatccggcctccttcactcgtgccaagaaatgggttcaagaacttcaagctcaaggaaatccgaatacaatagtggctcttgctggtaacaaggntgatatgcgagatgcgaggcacgtggcagtagaggaagcaaagacgtatgcccaggagaacggtctcttcttcatggagacatctgcnaaanctgcaatcaatgtgaatgncatattttatgagtngcaaagngattcttnaggggcangaggctccnagtccacnggctggattgtctgaatcagagncagntgag

SEQ ID NO: 3193 - DNA, 94 bp, Zea mays
  misc_feature: Incyte ID No: 700161815H1
  unsure 56, 73, 76, 78, 81-83, 85, 93: a, t, c, g, or other
ttgttaagccgatgagagatctctacatcgcaactaatgagccattctataactancttcgacaagctcaggncancntcnnngncctttgtng

SEQ ID NO: 3194 - DNA, 101 bp, Zea mays
  misc_feature: Incyte ID No: 700161816H1
  unsure 28, 72-73, 77, 85, 92, 96, 98: a, t, c, g, or other
attgagacaaggaagctcagcgattacnaagacagggtttatacggagtgccaagaagtccggtgggtgaanntgangaccccgnggacacnaacnanctt

SEQ ID NO: 3195 - DNA, 98 bp, Zea mays
  misc_feature: Incyte ID No: 700161817H1
  unsure 28, 54, 66, 82: a, t, c, g, or other
ggagaagaaggggagggaatcgcccgantccaaggcggtcatcggcaaggccgnggacggcaaccngatggtcttctttcangccccgtcgctggcgt

SEQ ID NO: 3196 - DNA, 270 bp, Zea mays
  misc_feature: Incyte ID No: 700161819H1
gttacaaatacagtaccggcagtgagagaaactgttgagcaatattgctacaactccaaccaaccaggtgacaaatatgtgtgacagttctccaactgtgtttgatttgaaactatgtcaatgttgatgtcaaagaccatttacatgtcgaattacgacgatattatgtgaatgtcgaactatgaaaatactatgtgtaacggatgttggaactatttgttgatgttaaagacttgttgtaatgtgtttgtgaatgtgagttcatgtttg

SEQ ID NO: 3197 - DNA, 289 bp, Zea mays
  misc_feature: Incyte ID No: 700161820H1
  unsure 126, 278, 286: a, t, c, g, or other
atcaaacttggtgttggcggctttagtatgggtgctgctactgctctgtactctgcaacttgctttgcccatggaaaatatgggaatggcaaaccattccctgtgaacctaagtcttgccgttggncttagtggctggcttccatgtgccaggaccttgaagaacagaattgaagcctcaccagagtgtgcacaaaaggcttcatcaatacctcttttgctctgtcatggaaaagctgatgatgtagttgcctacaagcacggggagagatctgctgngcttgaangca

SEQ ID NO: 3198 - DNA, 102 bp, Zea mays
  misc_feature: Incyte ID No: 700161821H1
  unsure 15, 33, 71, 80, 83, 86: a, t, c, g, or other
agcatatcgattttntttcactggatggttgtntgcccttgtggttttgtaccctaactatttgtgttganatatatggnganacnttttgttccaaaaaaa

SEQ ID NO: 3199 - DNA, 286 bp, Zea mays
  misc_feature: Incyte ID No: 700161822H1
  unsure 108: a, t, c, g, or other
ctagcacagctagcgcctgctccccttcgcctgtgatcatgtcttgcagcagcggcaagtgcgactgtggctccagctgctcctgcggcagctcatgcaactgcatgncccctaacgtggagacggccgccgccagcagcatcaagaccacggtcctcgccgcgccgaccaccaaggccagcgccggcggcttcgaggcggccaccgagggcggcggctgcgactgcaacacctgcaactgggcaccagctgcggctgctcctgtgcagtgcaatgagccggtcag

SEQ ID NO: 3200 - DNA, 271 bp, Zea mays
  misc_feature: Incyte ID No: 700161823H1
  unsure 9, 55, 103-135, 230, 241: a, t, c, g, or other
aactcagcngcgcctcgactcgtagcccgaaccctagccaccaagccggagggangagagcagccatggcgcggtgcctcgcgctcgtcgccctcctcgtacnnnnnnnnnnnnnnnnnnnnnnnnnnnnnnnnncgcccttcgtcgtgcgcacaagaaaatttgctctcccgccccaagccgggcgtcgacgcgtcctgtctcctcgacttacaaccaggatcgcgacngctatgattgncattatgcgatcatggcacagagtgttgag

SEQ ID NO: 3201 - DNA, 263 bp, Zea mays
  misc_feature: Incyte ID No: 700161824H1
ctaccctgcaaccagttcaccagcgggatacccggcggtgccttgttgccctcatccacctgagggcggtcggggttaagagagagcccagctgcagctagacttcatgtgcatgatattgcagaattaccgtctctgaatacagatacagaaactagcatttatatacgaatcatatattatctatatcctcatgccatgagagatgtgtatcactctcgctaaataattagcagtacgacgcgctgctgtcacatgtgcta

SEQ ID NO: 3202 - DNA, 100 bp, Zea mays
  misc_feature: Incyte ID No: 700161826H1
  unsure 2, 4, 6, 43, 78, 96, 99: a, t, c, g, or other
cnananagaccattggcaataagatccttatcttcctgcacanattcacacatgatatttgctggttcgtcagctggntatgcacattagcggggnggng

SEQ ID NO: 3203 - DNA, 90 bp, Zea mays
  misc_feature: Incyte ID No: 700161831H1
  unsure 81: a, t, c, g, or other
atgaggtccgagcagcagaggacggaggacattcttcgttacatacagtccgcaacgggtgtagctccaccaacctttgcnattcactcc

SEQ ID NO: 3204 - DNA, 290 bp, Zea mays
  misc_feature: Incyte ID No: 700161832H1
  unsure 217, 228, 245, 270, 281: a, t, c, g, or other
cagcatccaacgtgagcgcatggatgtattattaaagcaagtgcatgaagcagaactggtaaggattagagagcaagaagagatgaagaagaagcaagatgccatggatgctcaacttgagcttatgctaagtcagattcaaccaagttaaagctaactagtatggggtgttaggctttgttggtacttctcttttgctgatgctattgcattctantgatggataantacgtctcaatccattnttgctactgtgctgctagagtactntacggcagggnggtgtgtgg

SEQ ID NO: 3205 - DNA, 289 bp, Zea mays
  misc_feature: Incyte ID No: 700161833H1
  unsure 54, 188, 241, 286: a, t, c, g, or other
ggaacttctttattccaactactaattcatcaaaggaagataagaaaacttttntgacaactgcggtaaggaaacatgagagcgatatgcaggagaatcacaatggcacaaaaaatattgtagtatcatctgaaatgcaagtagtaccttgcagcatgaaagagatagtatcaagtgacatgaaagangaggatcattcctctccaggttttcttgcagagaacttatttgctgacttggngctttacatgttcactaatgcagctgattaaaccactgaggaaancag

SEQ ID NO: 3206 - DNA, 284 bp, Zea mays
  misc_feature: Incyte ID No: 700161835H1
  unsure 276: a, t, c, g, or other
aatgtccgtactagtgatgacagtgataatatcatagtgcttgtgagaactgactattctctcagtgcatcagaccttggcaatcatttatttaactggacaagaacttctttcactgcaaactactatgtgaaatacaagcaccctgacatgcttgatcagtcatcttgcctgcaaggagacattccatgcattagaactgagggtttgccacttgctttacctgatttaaattcagctaatgtaattgtcttgaaagatggtacccttttgttntatgcagg

SEQ ID NO: 3207 - DNA, 220 bp, Zea mays
  misc_feature: Incyte ID No: 700161836H1
  unsure 75, 91, 125, 146, 217: a, t, c, g, or other
attctcgtgtcatggaactgcgggaagtacgacgaataagatttattgagcatgtgtgcgtgcctgcattctgcnactctggctgtgagangaatctattatcataagcagctgttactctacgngattcgtcattcacatcagcngttactctggcgtgattacacgaattttttgttcagacggtgtgggctgttgttgaataattagacaattncaa

SEQ ID NO: 3208 - DNA, 277 bp, Zea mays
  misc_feature: Incyte ID No: 700161837H1
  unsure 101, 112, 213, 232, 249, 254, 262, 267: a, t, c, g, or other
gtaataatggatcaagagatcatcaatgatgttaacatcttgatgagaatttcctttcaaattcatgctgcactgctcaggctccgtggggtgattctacnaaagaaaaggngaaacatgggcctgaccgcataaaaatatcggtcagcgtttgtactcacccctggggatttcttgtcaatgatctaacctgtgatataggccttgtaactncgttgtgagtaagttcatnaaagctaaccggcggancattngcacatanagaantaggagccac

SEQ ID NO: 3209 - DNA, 80 bp, Zea mays
  misc_feature: Incyte ID No: 700161838H1
gttgtgaaagacgaagaataccgcggagaaatcaaagttggcctcacgttcactccagaggaccagggcttctgaggaat

SEQ ID NO: 3210 - DNA, 56 bp, Zea mays
  misc_feature: Incyte ID No: 700161840H1
  unsure 37, 47-48: a, t, c, g, or other
gtctcggtacactcatacagggttgtgcagttgtccntcccgagagnncaacagaa

SEQ ID NO: 3211 - DNA, 98 bp, Zea mays
  misc_feature: Incyte ID No: 700161841H1
  unsure 57, 64, 68, 73, 76, 78, 80-81, 83, 91: a, t, c, g, or other
cctaatccaaaataatgagatcttaactagtttaatctattcgtatcaacctaatcnagattcnatcnaatcnatnangnncnaatccagnggaaggg

SEQ ID NO: 3212 - DNA, 97 bp, Zea mays
  misc_feature: Incyte ID No: 700161842H1
  unsure 12, 74, 90, 95: a, t, c, g, or other
gggaccattggncaataagatccttattctttcctggcacaaattcacacatgatatttgctggttcgtcagcnggttatgcacattgcnggggncg

SEQ ID NO: 3213 - DNA, 282 bp, Zea mays
  misc_feature: Incyte ID No: 700161843H1
  unsure 165, 271: a, t, c, g, or other
atggtaacgcggcagctgagagatcttccatgctcaatgttgacccgaacgtgctctggtaattggtagttttaatgctggaggtcatggttaaaattggcagagaaacaagtagtggctgatattttagcaaaaaatagacacgttttgattcttagtttttgntctcttgtgagtcttgagcacattcctgaaattgtactattcaggtggctctcaaaagctttcaatggagtgtttttagcctatctaaataatttgcatttaaggnttaatgaaagt

SEQ ID NO: 3214 - DNA, 92 bp, Zea mays
  misc_feature: Incyte ID No: 700161844H1
  unsure 90-91: a, t, c, g, or other
agaacagtagaacgagaccacaataatcgttgtctacaccctcgaaatgaagttgttgctaatttctggaacatcataggctaaaaccgnnc

SEQ ID NO: 3215 - DNA, 78 bp, Zea mays
  misc_feature: Incyte ID No: 700161845H1
  unsure 66, 76-77: a, t, c, g, or other
gatattttgagcttgtcataaagatgtatccccaagggagaatgtcccatcatttccgcgagatgnaagttggtgnnt

SEQ ID NO: 3216 - DNA, 81 bp, Zea mays
  misc_feature: Incyte ID No: 700161846H1
  unsure 48, 69-71, 73, 76, 79: a, t, c, g, or other
cacacttcagtcttgtccggttgtcccatcacagctaaagcaaaaccnccacccatcgagtgatcctgnnnangangcntt

SEQ ID NO: 3217 - DNA, 251 bp, Zea mays
  misc_feature: Incyte ID No: 700161849H1
  unsure 12, 37, 49, 70, 72, 77, 84, 89, 132, 141, 148-149, 153, 161, 163, 174,189, 198-199, 201, 212-213, 216, 229, 232-233, 236, 248: a, t, c, g, or other
gccaggtaccanctgcctgagggttgggtagatgggnaagctgtgctgnagcaacgaagcggaggaggangncgggntcaaccncctgnggctgctggtcgccgccatcatcgcgctggtgttcatgctccnctgcgcgcngcccaannggcnctgcgtcncngtctacccgtnctgctgacccctcantcagcgctnncncctcctcgctnngcngatgccgctgccnggnnatnctcgtgcggganaag

SEQ ID NO: 3218 - DNA, 246 bp, Zea mays
  misc_feature: Incyte ID No: 700161851H1
  unsure 16, 28, 62, 67, 71, 92, 94, 128, 187, 196, 211, 215, 230, 237: a, t, c, g, or other
cttcgtgctcgggtgngccaggtccacngcggcccagctgacgtccccgtcctgcggctcgnccgcncgcnacggggtgcggctggtgcagnangccaaggcgtgcgtggacgacgactacgtgcgcnccatggtcgacctcctggaggagcggcgcggcgcccgcccggacctggcggccagcctngtgatctcngcgtggaagcgcctnggcntcaaggacctggacntcagcgncggcaggaa

SEQ ID NO: 3219 - DNA, 246 bp, Zea mays
  misc_feature: Incyte ID No: 700161854H1
  unsure 64, 66, 79, 105, 126, 159, 188, 190, 201, 204, 207, 212, 217, 222, 227,234, 236, 240: a, t, c, g, or other
cccgtactcgtcgccagcaagcaagcgctccccgcggtgttcacacctcgacctgcgacgtgangncggcgtggaccanccgccgaccacacgccttggagtctnccagccgccgaccacaagcgncgccgccgaccgccgcaaaggggaggagagatnaagtgggggctggcagccgccgtggcttncncggcgaccgtngcngcngcgtntgcgncgagntcctngcctgcnantgcnacgcct

SEQ ID NO: 3220 - DNA, 244 bp, Zea mays
  misc_feature: Incyte ID No: 700161855H1
  unsure 84, 152, 154, 159, 192, 223: a, t, c, g, or other
gattcttgctatcaacaaggagccaattacatgcttccttgaccattgagaagacttgccaagagttggaccaatccattgggncagatggagtgcttaacatgacaatattccgtcagggaaaagaaattgaccttgttgtcggaactgangnaaganatggcaatggtacaacccgtatggttaattggngtggttgcattatccaggatcctcactcagnagtgcgtgcacttggcttttt

SEQ ID NO: 3221 - DNA, 245 bp, Zea mays
  misc_feature: Incyte ID No: 700161859H1
  unsure 17, 27, 63, 155, 189, 192, 201, 203, 232, 240: a, t, c, g, or other
ggcgagctccccaagcnagccgctgcngctgcagctgcagggcaaggagacgaagttcccggnagcggcgacggcgacgaatgttccgccgcgccgtcgggtgctccggcagctgatgaatctgttgaagcgccgcatggcgaagcaccaaaganccgagctcacagtcttcgccgaccactgatctcntcngcatctgananctgtgtcaagcttgtttttttttcttccngttcccangtttc

SEQ ID NO: 3222 - DNA, 247 bp, Zea mays
  misc_feature: Incyte ID No: 700161861H1
  unsure 66, 210, 212: a, t, c, g, or other
ctgggttcaaaggtcattctccgacacgctcgactcgtggtggcgtcacacattggaccaggggangtgctcgaggacgaaagcgctcgccatctacaactctacagggctgacagagtacgatccggatggggtggatgcgagggcgatcaaagagatcattgagggggttcatgtgatcaggcttggcaagtatagactcactaccananaagctacgttcgatggattagtgcttagtatccta

SEQ ID NO: 3223 - DNA, 188 bp, Zea mays
  misc_feature: Incyte ID No: 700161862H1
  unsure 81, 163, 167, 169-170, 172-173, 176-177, 179-180, 182, 187: a, t, c, g, or other
cctttacgcgcccgcgccgccgccccctcaattcacacttcataaagccgatggctatgcaccgcgccgccgcgctcgcantgcgccgcctctccgccgcagcggcggcagtggctccaagccccgtctcccttgcccatctccggccggtggtggtggcggnaacngnnannaanntnntnttttng

SEQ ID NO: 3224 - DNA, 177 bp, Zea mays
  misc_feature: Incyte ID No: 700161863H1
  unsure 14, 67, 116, 124, 142, 146, 160, 174: a, t, c, g, or other
ctgatacaactgcngaggcacttaaggcaatactgttgctgtctaacattccttcagaacttgtcgnggatccaataaaacaagaacgactatatgatgccgttgattgcctcctntctttcgngaacaaagatggtacatnatcntcagctgaatgtanacgagcaacttcanggg

SEQ ID NO: 3225 - DNA, 178 bp, Zea mays
  misc_feature: Incyte ID No: 700161864H1
caggaaaagacaccttggcttatcgttctcatgcattctcccatgtacaacagcaacgaggcaacgagagtatgagggctgctttcgagaaatggtttgtgaagtacaaggtcgacttggtgtttgcagggcacgttcatgcttatgagagatcataccgcatttctaatgtcaacta

SEQ ID NO: 3226 - DNA, 243 bp, Zea mays
  misc_feature: Incyte ID No: 700161865H1
  unsure 14, 21, 80, 85, 142, 214, 222, 226-227, 237, 240-241: a, t, c, g, or other
aaaagtcgcgtgcngtgctcngctctcgcctcgcacggactcgtggtaaaggatggagaccatgtcggctctcgcgaggncggcnccgccccttgctgggaccattcgccggccgtcctgcgcgctgcggccgacggcgtcnctctccttcgccgccgcttcaacgacgccccgcggccggctcgggctggggctgagcacggcgccggcgggnagcggganggcnnccaaagctcncgnntc

SEQ ID NO: 3227 - DNA, 244 bp, Zea mays
  misc_feature: Incyte ID No: 700161866H1
  unsure 128: a, t, c, g, or other
cacaagactattctatgttatttcttaagatattcattaggaattgtaggttgtatgtgcagcttggatttccttaatgaagcttcagtgcggatgctcataggaagcagcagaaggataagcaaganaagtcagagacggaggatgcggcacccaaaaacatggcagcctctagcaaccaggatcagaggcaaaccttgaagttcggattctctaaaatggctccttccaaggtggatatctc

SEQ ID NO: 3228 - DNA, 240 bp, Zea mays
  misc_feature: Incyte ID No: 700161868H1
gagtgaatcatgcagaagtttctttggccgattaaacgagtcgttgttagtctggggaagcaaattacctgttgagtcaagggcatgctactcgaagatggtagaggagctatgcgcgcttctggtggacaccccaagcgagacgctgaacctacccatggggtgtcttctaatgatgctcaacgctccagttccggacgagagcaggtcgtcgtacctgcaggacgcactctccgtctt

SEQ ID NO: 3229 - DNA, 238 bp, Zea mays
  misc_feature: Incyte ID No: 700161871H1
acttgatactgcaactgggaacttgactaaatacaatgctgcactgaggttcactcatgaagaccttgtcgcatccctgaacctgaacaacaagggagacagccttactggagcctactatcacaaggtgagcgaattgaccaacacagctgttggggcagagcttacccacagcttctcgaccaatgaaaacaccctcacctttggcgggcagcacgcctggacccataaccgtctt

SEQ ID NO: 3230 - DNA, 237 bp, Zea mays
  misc_feature: Incyte ID No: 700161872H1
  unsure 22, 27, 31, 40, 88, 210, 213, 217, 219-220, 224-231, 233-236: a, t, c, g, or other
cgtgttttagacatcataatgncacantganacatttggntttaactttcaaacattgtacataagcagagggaagtacatgtaagangtttgaaagttaaaaccaaatgtttcattgtggcattatgacgtgttttagacatcaattcatggctttaaactggtttgttcagagtcattttagcaaaaactgagtgttctgcatgaagncanaaananncaannnnnnnnannnna

SEQ ID NO: 3231 - DNA, 240 bp, Zea mays
  misc_feature: Incyte ID No: 700161873H1
  unsure 24, 60-77: a, t, c, g, or other
gcaagggagacctggactggaggnggaggacctacctacccggcctccagctctctcgtnnnnnnnnnnnnnnnnnngaagctccgatccgatcccccaatgtctgacagcagtccagctcccggcgcctactactccggccctcccgccgcgccgccgcccgagtctaagcccgttgacggcggccaggtcaacgccgatgttcctggctactactcctccgtccctgctgcgaaatct

SEQ ID NO: 3232 - DNA, 240 bp, Zea mays
  misc_feature: Incyte ID No: 700161876H1
gctcgtagaagccatgaaattctaggccatgaggttgcaatagacacagcggcaccacttgagaatgattcagctgctggtgggtacattgatccaatggatctttacggagcttatggttcaatgagatctttcggcaggttctgtggcggtctagattacaattatggctatggccccagcagcggaagcagccgatcaagatcggattggcgataccgaccttactgaacgtgtcca

SEQ ID NO: 3233 - DNA, 104 bp, Zea mays
  misc_feature: Incyte ID No: 700161877H1
  unsure 55: a, t, c, g, or other
ggagaattagattagtatctgtttttttgaatgggatgtgaacgtggctgtgaanctcaggattgtatgctcgttgagaaagaaatggaaggacttcgtgatgc

SEQ ID NO: 3234 - DNA, 239 bp, Zea mays
  misc_feature: Incyte ID No: 700161878H1
  unsure 38, 88, 97, 207, 213, 229, 233, 238: a, t, c, g, or other
gtcgtcacaaagttgtttgtgcatcgcggcggcgacangggggcgacgaggcaggcggagcgggcggcgactacagcggcagcagatntcacggaanggcggcgaaggcaatctcgagccccgtgccggtggagtggtacccgacgctggccgtcgtcatggtatccgtaggcctcatgttcaccgcctccttcttcatttatgagnaacttnatccggagaaccgtancttntaaang

SEQ ID NO: 3235 - DNA, 238 bp, Zea mays
  misc_feature: Incyte ID No: 700161881H1
aataaacttcaacaagaaaaacaggccagcaaggagaagatatcatttggtcggtttgaagtccatgagcttgctgtcttttttcgaaactctgctgggcactacgaggcgatcaaccggaactacccaaactactttctgtctgaggaatctgtcgccttgttcaccgagcaccacctgcggtacccagcgtacataatcgggcagatcgttcacatcgagcggcacatagcgcacc

SEQ ID NO: 3236 - DNA, 236 bp, Zea mays
  misc_feature: Incyte ID No: 700161882H1
  unsure 15, 19, 36, 44-45, 53, 61, 70, 73, 101, 137, 172-173, 175, 178, 181-184,194, 196, 208, 211, 219-221, 231: a, t, c, g, or other
cctcgttcctgtcgngcancacagacctccacttcnacatctcnnccggcgtnggcgcggncagttgcancanggcggactccaaggccacctcggcggtnacactccgcatcgcaagttcatgaccaaccgcctcntggcgcgcaagcaattcgtgcttgaggtgatccanncnggncgnnnnaacgtcttcnangcggagttgaanganaggcttgnnnaggcgtacgncgtgt

SEQ ID NO: 3237 - DNA, 233 bp, Zea mays
  misc_feature: Incyte ID No: 700161884H1
  unsure 49: a, t, c, g, or other
gaaaatcataggcttaaatccatgttcagtattcacatcgctccaggantctgggccatgactccatggcaatgaatcaaaatagtacgagccgcatcatgtggacaaccttggcagatctttttattcttgtctttattgctgggagcactgtagctttaaacctacaagtagtgcttgaatgagatgagattcatatcatctcctgtggtggaatgtgaaattgtatgtga

SEQ ID NO: 3238 - DNA, 234 bp, Zea mays
  misc_feature: Incyte ID No: 700161886H1
  unsure 158: a, t, c, g, or other
gatggcatcttggaggatgttgtctacccagctgagattgtggggaagcgtgtcagataccgtctggatggttccaagattatcaagattttcttggacccaaaggagaggaacaacactgaatacaagctggagacctgcactgcggtctaccgcangctgtgtgggaaagatgtggtctttgagtaccctatgaccgaaaatgcataaatatgatgccctctggatatctcc

SEQ ID NO: 3239 - DNA, 235 bp, Zea mays
  misc_feature: Incyte ID No: 700161891H1
  unsure 104, 144, 157, 162, 165, 231: a, t, c, g, or other
acgacattcacctacaacgcgctcctgaacggccactgcaaggagggaaacccgctcaaagcgttcgcgctgctcatggagatgtgcggcaacaacgacgctgnctgcctgccagacaagaccagcttcgggatcgtgttgacngcgctgctccgcnccggnganacctcagcggcgtggcagacgtacaaacggatggagcccgctggggtcctaggtgggacgggcgcncgct

SEQ ID NO: 3240 - DNA, 220 bp, Zea mays
  misc_feature: Incyte ID No: 700161892H1
  unsure 72, 78, 88, 96, 148, 154, 165, 177, 187, 213: a, t, c, g, or other
gtagcacgtcgctgcacctcgccgctcgcagcgggagcctggattgcacccggaagctgctcgcctggggancggatngtctccgganggattcancaggggaggatcccttacgccgtggcgctgaagcgcaaccacgagacgtgcncggcgntgctgaacccntcggcggcgganccatggtgtngccgtccccgttcaattcatcacganctggagc

SEQ ID NO: 3241 - DNA, 240 bp, Zea mays
  misc_feature: Incyte ID No: 700161893H1
  unsure 7, 97, 99, 101, 163-164, 187, 193, 195, 212, 215, 222: a, t, c, g, or other
gcgaganagaacccaaacggagagagacaatcgagagagatggcaaactgttttggtgacgtcgtggacaattacaagctagacacaatgccaagananancggcaaaaagaagactcgagaagaccgggcacgagaggcctcctatctcagtaatgagaatnngaagtacaggaaagctagagacnaggtgnanatgcttgaagggctggnacnggccaangggacgtcgaagctgtgc

SEQ ID NO: 3242 - DNA, 164 bp, Zea mays
  misc_feature: Incyte ID No: 700161894H1
  unsure 49, 57, 109, 111, 115, 127, 151, 155, 162: a, t, c, g, or other
ggtcgtgtaatcatcagccttctgatcgtcacccatggccactgccgangtccagancccgaccgtcgtggcgaccgaggaagcgccggtggtggagaccccggctccngncgcngccgtgcccgangaggctgctcccgccgccgaagcnaagnttgaganga

SEQ ID NO: 3243 - DNA, 103 bp, Zea mays
  misc_feature: Incyte ID No: 700161895H1
  unsure 72, 94, 96, 98: a, t, c, g, or other
ctagggttgctcggcgatggcgtcggcggcgaagacccttgcacgggttggatcatccctcttcggccgcantctcgcgtctccgtcctcgtcnananccggg

SEQ ID NO: 3244 - DNA, 249 bp, Zea mays
  misc_feature: Incyte ID No: 700161903H1
gtgacggttgctctagatccgttcatcctggtggttttgtgaggtcgaaagcggcgagcgaattagaagatgctggacaagctgtgggacgacgtggtggccgggcctcgcccggagacgggcctcgagaagctccgcaaggccaccaccgcccgcccgctcgtcatcaacaaagacgcggacggcggcagctacaagcgggcgcagtcgacgccgtcgaccccgacgacgccggtgacgccgtcgtcg

SEQ ID NO: 3245 - DNA, 246 bp, Zea mays
  misc_feature: Incyte ID No: 700161906H1
agatgttgaaactgaaccgggccccataggtgtaaaggaaggcagtcttgttgggaagtatgaatctcttgtacaggttactgtcataccgaaggaaaggagcaagcatcacgaaaagaatgtacctctacctcaccgagtggggtaacagataagctacaagaggtgcttaaaaaagtaaagagcgcaacaagacctggaatctacgatgacctttatggggattctgttccagcaaaagtgggc

SEQ ID NO: 3246 - DNA, 246 bp, Zea mays
  misc_feature: Incyte ID No: 700161907H1
  unsure 211: a, t, c, g, or other
gcggcacggacctggaccacggcgtggcggcggtcggctacggcgtcacgacgacggcacgccctactggatcgtcaagaactcgtggggcccttcctggggagagggcggctacatccggatgcagcgcggcaccggcaacggcggcctctgcggcatcgccatggaggcgtcctttcccatcaagacctcgcccaacccgtcgcgcaancccgccgcgcgctcatcaccagggacgcctcttcc

SEQ ID NO: 3247 - DNA, 245 bp, Zea mays
  misc_feature: Incyte ID No: 700161909H1
acaacacgctccactaaccctagcgacagcctcgggtcgtcgtttgatccccgcggggagctctagttccgccaagcgtgcgtaccggcgtccggatccgggaccgaagatgacggagtccctggtgcggaacaagccggggatggccagcatcaaggagatgccggtggtgcaggacgggccgccgccgggcggtttcgcgcccgtgcgcttcgcccgccggatccccacctcggggcccagcg

SEQ ID NO: 3248 - DNA, 195 bp, Zea mays
  misc_feature: Incyte ID No: 700161912H1
aagacgctcgctgctgacttgagcaatcaacaattagctgatgattagattcttcttgattttgatgatgaaaggtcatttatatgtagctcactacagcaacgcagtgtaaggaaaattgtacctgctcgatttaaactttaaagagcatgccatgagtagctttgttaatgttaatattcacatccattgtgg

SEQ ID NO: 3249 - DNA, 166 bp, Zea mays
  misc_feature: Incyte ID No: 700161913H1
cgagtaataattagtaccagtgcatgcctttgtcttgttatatcgtagttagcagtttgtatttgtatggtttcactgtcagaaagtctatgcagcattccttctggtttccatctgtatccacgtaggcaacaattctcatccatggattggtattgctcacccc

SEQ ID NO: 3250 - DNA, 248 bp, Zea mays
  misc_feature: Incyte ID No: 700161914H1
  unsure 178: a, t, c, g, or other
atgaactggatgagaagacaagtgcttctctgaaattcacggtactgaacccaaaaggacgcatctggacaatggttgcaggtggtggtgctagtgtcatatacgcagacactgttggtgatttgggatatgcttcggagctaggaaattatgcagagtacagtggagctcccaaggnggaggaggttctgcagtatgctagagtgcttttggattgcgctacctctgatcctgatggccgtaagaga

SEQ ID NO: 3251 - DNA, 251 bp, Zea mays
  misc_feature: Incyte ID No: 700161915H1
atccgacctgatgaaggatattacatgggaggcgctttcgttttcacctttcaagtgtccccatcttatcctcatgatcctccgaaggtcaaatgcaagaccaaggtgtaccatccaaatattgatttggaaggcaatgtctgtctgaacattctgcgtgaagattggaagcctgttctcaacatcaacaccgttatttatggcctgaatcttctttttacgcaaccaaacgacgaggatcctttgaacca

SEQ ID NO: 3252 - DNA, 256 bp, Zea mays
  misc_feature: Incyte ID No: 700161916H1
tccaactcttaggccgtcgccaaagaataaccccaagaattgctctgccaccaccaacaaggaccgcgtattcgcggtccagtagctttagccaacagtctggtgtttattcgcgatcaagtagctttgaccaacaaacaagtggcgcctctcagcaacgttctgagagcttgaaacagcagaagaaacctgcagccacgaagagacctgacacttatgcttcagaaagagctttagaggacagaattctgtgccc

SEQ ID NO: 3253 - DNA, 249 bp, Zea mays
  misc_feature: Incyte ID No: 700161917H1
  unsure 61: a, t, c, g, or other
gtagtgtagttccggagagggttggggagagtagtagtgatccgcaatgtcgacggaggangctgttgtggctgaggtcccggtgaccgaggtgccagcggaggtcccggcggcccaggtggccgaggcgcccaaggcgaagaaggcgcccaaggagaagaaggcgcctaaggagaagaagccgtccgcggcgaagaagccggcggcgcaccctccctacgctgagatgattgtagaggcgatcgctgc

SEQ ID NO: 3254 - DNA, 244 bp, Zea mays
  misc_feature: Incyte ID No: 700161918H1
  unsure 46, 97: a, t, c, g, or other
gaccactggatcttctgggtgggccctctcgtgggcgctgccatcncggccttctaccaccagtacatcctccgggctggcgccatcaaggccctcngctccttcaggagcaacgcgtgatgagcggggcttggctgtggagcaatggcgggcgacctacgggcgggggaagtcgtgagcgaggagaatgacatcatcgatcgacttgggtgccggtggttggttcgggtcgcttttttgtttc

SEQ ID NO: 3255 - DNA, 244 bp, Zea mays
  misc_feature: Incyte ID No: 700161919H1
gaaaattcttgatgtgcttgctttcaagactttgaagcataaaggtcaagcttgggttgtcttcgaagatgtcgcatcagctactgaggctctgaagaggatgcagggctttcccttctatgacaaaactatgagaattcaatatgccaagaccaaatcagatattatagcaaaggctgatggcacctttgtacctcgagaaagaagaaagaggactgatgaaaaatctgaaaagaagcagaag

SEQ ID NO: 3256 - DNA, 241 bp, Zea mays
  misc_feature: Incyte ID No: 700161921H1
ctcaagatatccgcacaatgattattggccgattgcttgctggaattggtatcggggtctcatctgctcttgtacccctttacatatctgagatctcaccaactgaaattcgtggaacacttggtaccgttaatcaactttttatttgcattggaattcttgcagctttgttagctggattgcctctggcaggaaatcctgcctggtggaggacaatgtttggaatgctgtagttccatcc

SEQ ID NO: 3257 - DNA, 243 bp, Zea mays
  misc_feature: Incyte ID No: 700161923H1
  unsure 148: a, t, c, g, or other
cgatggcggcgaggctggcacagctgcgcgctcaggcggtgcaggcggcggagttcgcctcgaagcacggcggctcctactacaaggagctcatggagaagaacaagcagtacgtcgtgcagccccccaccatcgagaaatgccaggngctctccaagcagctcttctacacccgcctcgcaagcctaccaggtcggtatgagtcattctggaaggagttgatggtgtcaagcaggtatggaa

SEQ ID NO: 3258 - DNA, 244 bp, Zea mays
  misc_feature: Incyte ID No: 700161924H1
  unsure 219: a, t, c, g, or other
caaatgttgaagcttttgtactcagagcaagtgatctggaagaagtcacctcgcagtttgctcgattcctgcgtaatccacgagtgcagggagcgatcaggtatgaatccccctactggcgaaccattgctgcaactcgtattcaggttgcatggaggtatcgtaaaaggcggctgaagcgagctgagaagtcgaggttgagcgaagagacttatgccncacttggatcttgacacatgattct

SEQ ID NO: 3259 - DNA, 244 bp, Zea mays
  misc_feature: Incyte ID No: 700161925H1
  unsure 62: a, t, c, g, or other
ctcccactcgcggtcgcggtagccggcggcggcggaggaggaaagcaggcaggccatggcgncgtcgtcgtcgaccccggcggccgtccgcgagatgcagaaggatctcgaggtccaggccaacgccctcagcaagatccagaaagacatcgccaagaaccaccaggtccgcaagcagtacaccatccaggtcggcgagaacgagctcgtcctcaaggagctggagctgctcagcgatggggcc

SEQ ID NO: 3260 - DNA, 234 bp, Zea mays
  misc_feature: Incyte ID No: 700161928H1
  unsure 231: a, t, c, g, or other
aatctatgaagagaacaaggatgaggatggattcctctacatgacctacagtggtgagaacaccttcgggctcctctagatggctcaccacaatcgggtctgccttgcccttgcttccctactgatgccctgcctcgtgtaaataagacctgccaagcaattgtgtatattctggtttcctcgctcaactgctggaagtctaaaacctaccttatcatggacaccgtttanatt

SEQ ID NO: 3261 - DNA, 244 bp, Zea mays
  misc_feature: Incyte ID No: 700161929H1
caaagcttcgagcaacaacagcttgctcgactcagcgcccatctatctctcttctcccccgcctgtctagccagcggcggccaccaccaccgttcagttattatagcaagcatgacgaagcacggcgtggtgatcggcccggaggacgtcgcggcggcgcggcatttctcgttcccgccgccgaggacggcggcgggcggcgagtcgtgcaggaagctggcggcgcaggtggacctcggccccg

SEQ ID NO: 3262 - DNA, 242 bp, Zea mays
  misc_feature: Incyte ID No: 700161930H1
  unsure 13, 55, 100, 112, 134, 136, 154, 164, 166, 196, 216, 223, 225, 233: a, t, c, g, or other
agcaataggacgntcgagcaagaagcaagcagcagtaacaagaaaccatcatcgntccatgtatccaccaatggcggcgctcggaggacggcggaggagngcgtcgtcagcngccctccagctagccttgtttncngtggccctggtctccctngccggcccancnacggacgcggggaacaagaccgggcaggtnaccgtgttctggagccagancaaggcngnaggcacgntgcggaagc

SEQ ID NO: 3263 - DNA, 244 bp, Zea mays
  misc_feature: Incyte ID No: 700161931H1
  unsure 219, 235-236: a, t, c, g, or other
ggctttcttcttgtacttaggctctcctcaccataagatctaagtggatgtgcagaacacttctggcaatataggcatagtggagttcggaatatagatggcgggggtaggtcttctggtgaggtcggccttacttggtagtgccgtcgtcgtcttgatatcgcatgggcgtggagagcttggtatgaaataatgcatgtaataatcagtgaaccgatnggaataccaggtccannggggggct

SEQ ID NO: 3264 - DNA, 111 bp, Zea mays
  misc_feature: Incyte ID No: 700161934H1
  unsure 40: a, t, c, g, or other
aaataaactgctaggctgatgacgcgctctaatataagcnagccgtcgcgcgcgcgtgctaatcgtcctcgatgtactagtgattgtgctatttaaatatatagtttcacg

SEQ ID NO: 3265 - DNA, 238 bp, Zea mays
  misc_feature: Incyte ID No: 700161936H1
  unsure 52, 237: a, t, c, g, or other
cttcatctgtgagtttttctatgatgcccaagagaaggtcctcccgtatgcngacttcatcttcggcaatgaaaccgaggcaaaaatcttcgccaaagttcgaggatgggagactgagaatgtcgaggagattgctttgaagatctctcagcttcctttggcttcaggcaagcaaaagaggattgctgtgattactcaaggtgctgatccagtggttgttgctgaggacgggaaggng

SEQ ID NO: 3266 - DNA, 150 bp, Zea mays
  misc_feature: Incyte ID No: 700161939H1
atataatagcggcgtctaaataagatcctgtcaactgcacccgccattatcgatccatggtcgctcctggggttcatgttcatctgtaacgtgctcgcggtcatgtccgtctcgtgccggatttaatatttatatgcatgtatttgtgtt

SEQ ID NO: 3267 - DNA, 239 bp, Zea mays
  misc_feature: Incyte ID No: 700161940H1
  unsure 109-130: a, t, c, g, or other
aatcacccactctactactcgaagttactaccagcagcttgcttcaacagtagaagagagcgagaggatggcgtcaccgaagccctcgtcggcggccctgctcctcctnnnnnnnnnnnnnnnnnnnnnnctggcgcgcgcggacctgacgcacgacaactgcgtgaagaacaagaaggtgacggtgcagaacctgtgcagccacgacgtgacgctgacgctggagccgctggccaaca

SEQ ID NO: 3268 - DNA, 237 bp, Zea mays
  misc_feature: Incyte ID No: 700161941H1
gatcaggtaaagtttgtcttttgtttagtgtttgttgaatgtggggtatgcgtgatcttgctgaatcggtgtggtgtgttgtaggcggcgcgtgccgaggtcgtggaggacttcggacccctgaacagcgtgcggcccgaagtggaggccaacccggtggtggccgaggctgaggtcgacccggcaccgcccccggaaaccggtggaggctccctcgctgctcctgcggctactacg

SEQ ID NO: 3269 - DNA, 238 bp, Zea mays
  misc_feature: Incyte ID No: 700161943H1
  unsure 153: a, t, c, g, or other
tttcgttcctttcacaccggggaccggcgagcagagccgcgcacagcagaacgcggaagcaagaggaggcgatcgactactcgaccagccctctccgtgtctccgatggcggctcgcgtcctcgcggccctcgcccttgccctcgccctcgcnctcgtcgccgtacccgctcccacgcgggcgtccaacgacgagggggacgcgctctacgcgctgcggcagggctgtcggaccccaa

SEQ ID NO: 3270 - DNA, 238 bp, Zea mays
  misc_feature: Incyte ID No: 700161945H1
cgacgatgcaaagacaggcctacgaacaaactactacggcacaaagcaagtaatcgagactttactgcctctactgcaagcctcctccgatgggaggatcgttaacgtctcctcccacttcggccagctaaggcttttccgaaacgaggagctgaagcgggagtgaacgacattgacaacctcaccccggagaggctggatggcctgctggacatgttcttaaatgacttggaggccg

SEQ ID NO: 3271 - DNA, 241 bp, Zea mays
  misc_feature: Incyte ID No: 700161946H1
ccacttcatctgctcttccattggagcttacattgcaatccatgtcctcaaggcgaaacccctgattcaagttgaaccggaggaccgctggaaaaggatatttccaatgtccttcgtcttctgcataaacattgtgctgggaaatgtcagcttgcgctacatcccagtctccttcatgcagacaatcaaatctttcactcctgcaaccacagttattctgcagtggctagtctggagcaag

SEQ ID NO: 3272 - DNA, 244 bp, Zea mays
  misc_feature: Incyte ID No: 700161947H1
  unsure 170, 208-209, 225, 237: a, t, c, g, or other
gccgcgcctgcgacacccatccgccgccacgccatggccaagtacaacgtggtgcagaagaacaagcgccagtgcaatcaggaccgcaagcgcgccgcgcatggggagcccgggaccggcaagctcaagcagcggaccgcgcccgtctccatgtccggcaagcggaagangaagctcgagcgccgcctcaaccggaagcagaaagagnntgcgatgattagggcnttggagaccaanatggggg

SEQ ID NO: 3273 - DNA, 242 bp, Zea mays
  misc_feature: Incyte ID No: 700161948H1
  unsure 71, 94, 110-111, 149, 164, 185: a, t, c, g, or other
tctccatcggcgacgtcgtgcgcgcggtggtggccgagcacagggaggagctgaaccggctcaatgactanatccagggaggctactaggacgncgtgtgcagcgacgannccctccgatcccgccagtcagtgaagtccgcctttganatccaataactcggnacaatgatgatgacgaaatangccgtgttttcttggacaatgatgttaagttcggcaagttttctttctcttttttta

SEQ ID NO: 3274 - DNA, 241 bp, Zea mays
  misc_feature: Incyte ID No: 700161950H1
  unsure 86, 142, 185, 192, 194: a, t, c, g, or other
catcaatacaatataatctaatggcgtccaaggctctgttcctcctcgccatcctgctgctagcgacgtcggccgccgtgctcgcngccgcggcggagcaaactcatgaaaacaacgagaagatggtggcgaggagcaaggncgccgccgccggcgtgatgaagcagcaaggaacgtgcgcggcngcggatnanacgagtacggccacgcctgcgagtacggctgctgccaccacgtattc

SEQ ID NO: 3275 - DNA, 115 bp, Zea mays
  misc_feature: Incyte ID No: 700161951H1
  unsure 8, 12, 81, 84, 87, 96, 100, 109, 112-113: a, t, c, g, or other
cggaacgntggnccggcaaacaaacagaatccacaagggaggcagaggcagacccgacccgaatcaccgccgtcgtcgtcnttnagnagagcacanagtngatttttanccnntt

SEQ ID NO: 3276 - DNA, 98 bp, Zea mays
  misc_feature: Incyte ID No: 700161953H1
  unsure 45, 55, 73, 76, 78, 80, 86-87, 90-91, 97: a, t, c, g, or other
ctcgaacgcaactggttgtatctatatccttgaatgccgaataanggaggggcantaaactgcagcgaaaaanaananangaaaannaannaaaaana

SEQ ID NO: 3277 - DNA, 238 bp, Zea mays
  misc_feature: Incyte ID No: 700161954H1
  unsure 181, 196, 204-205, 209, 213, 219, 221, 226: a, t, c, g, or other
gcggcgagcaggagcagctgctgcggccacagcatgctgaagctgcccgagatcgtggtagagtagtagtagtactgtagtagggtggaaattccaccgtgggagaagggtgtgcacatatgaacaagcaactgtgaggtgagtgtgactcgccggcgtaaatgtagactaagatcgccgntgcagggtgtttganctagtccnntacnaaanaagttncnggagnaaaaaataatgt

SEQ ID NO: 3278 - DNA, 238 bp, Zea mays
  misc_feature: Incyte ID No: 700161955H1
  unsure 151, 210: a, t, c, g, or other
attgggccagtttttgatgctatgggcctcttcctgttggcacattttcgccgccttttctcactgtttttccaatggatgcacactgatgataataagacagttcttctgactttaaagcaaatacatgccattatcaagcttacctggntcaggaagtcaccttatactttgaggctggtggacgagcttgttctattatataaagantcagccacaaggagcaaccgtgaaatca

SEQ ID NO: 3279 - DNA, 233 bp, Zea mays
  misc_feature: Incyte ID No: 700161956H1
  unsure 32, 41, 59, 70, 103, 141, 144, 173, 176, 196: a, t, c, g, or other
gcttcgaggactacctgccggtgatggcgganggctgggcnaggacgggctgatgcggnagtggcgagcnggttccggctgctgatggacccggcgcgcgggntcatcaccttcgacagcctccggcgcaacgccgctgcnggnactagccggcatgtcggacgccgacctcngcnggatgctcgccgagggcganttcgacggcgacggcgcgctcagcgagacggagttct

SEQ ID NO: 3280 - DNA, 171 bp, Zea mays
  misc_feature: Incyte ID No: 700161957H1
  unsure 2, 21, 118, 126, 142, 147, 168: a, t, c, g, or other
anaaaacatgtcgttgttganggggagcttactaaggaggccatcatggaattggcacggaatgaacagttaaaggagcgccacgaaatggagaaaaaactgcagaagtttgcccaanacaatggnttatctggaaagggcnaaaanggcaggaaaaggcaccactgnttt

SEQ ID NO: 3281 - DNA, 240 bp, Zea mays
  misc_feature: Incyte ID No: 700161958H1
  unsure 218-219, 224: a, t, c, g, or other
tgattttttggcctctctcccagagaatgactgccgatatgcgctgtatgattttgattttgttactggggagaatgtgcagaaaagcaagattttcttcattgcctggtccccatcgacatcccgcatacgtgctaagatgctgtactccacgtcgaaggaccgcatcaagtacgagcttgacgggttccactacgaaatccaggccgaccgacccnncggangtggacatcgaggttc

SEQ ID NO: 3282 - DNA, 221 bp, Zea mays
  misc_feature: Incyte ID No: 700161962H1
  unsure 74: a, t, c, g, or other
tgaagtggaccagcttccggccgtgggacgcgtacacgtcggacacgtccatcgacatagggaagcaccacgcnccgacgacgctgcccgacaaggcggcgtacctgatcgtcaagtcgctgcgcgtgcccatggacctcttcttccagcgccggcacgccagccacgcgctgctgctcgagacggtggcggccgtgcgggcatggtgggcggcatgctcc

SEQ ID NO: 3283 - DNA, 235 bp, Zea mays
  misc_feature: Incyte ID No: 700161963H1
  unsure 184, 187, 200, 208, 210, 229, 232: a, t, c, g, or other
cctttccttgcgaaggatgatggtccgcttcttgaggagtgtggtttggattgcaactaggatgtcagtgcatcagctcccccaatctgcatatgcttgaagtatattttctggtgtttgtccccatattcagtgtctgtagataagagacatgaaatgtcccaagtttcttttgatccagggngancctacttaatatntgagagananactgggaaaaaaggaggcngcngca

SEQ ID NO: 3284 - DNA, 168 bp, Zea mays
  misc_feature: Incyte ID No: 700161964H1
  unsure 98, 115, 121, 125, 130, 140, 152, 155: a, t, c, g, or other
tactaactagctagcgatcgagcagcgatacagtacaatggcgccgaagagcctgcttgtcgtcgccgccctactcgccgtcgtcgtctccgcctgcnagctgccccgcggtgcnacggcnttgnaggcnagcccccagnaccaacacaacncangcttcatgtctcg

SEQ ID NO: 3285 - DNA, 166 bp, Zea mays
  misc_feature: Incyte ID No: 700161967H1
  unsure 32, 46, 65, 70, 73, 75, 80, 95, 109-110, 114, 129, 131, 142, 150-152,156, 163: a, t, c, g, or other
ccgaaccagatcggcgacgcgcagggcacganggtgccagcgtganggaggaggacctcatccanccgcngcngngcgcncgcactgtggaacgntctgcggctcaacnnccgngtgggcgtaacagtncntagagacatanataaaaannntcantatccanacc

SEQ ID NO: 3286 - DNA, 233 bp, Zea mays
  misc_feature: Incyte ID No: 700161968H1
ctagtgacggttgctctagatccgttcatcctggtggttttgtgaggtcgaaagcggcgagcgaattagaagatgctggacaagctgtgggacgacgtggtggccgggcctcgcccggagacgggcctcgagaagctccgcaaggccaccaccgcccgcccgctcgtcatcaacaaagacgcggacggcggcagtacaagcgggcgcagtcgacgccgtcgaccccgacgacg

SEQ ID NO: 3287 - DNA, 234 bp, Zea mays
  misc_feature: Incyte ID No: 700161969H1
  unsure 65, 69, 84, 174, 187, 200, 204, 215, 230-231: a, t, c, g, or other
agcacacgaatccaaagaacacgaaccggcagtttcagcttcctgtccgagacctcggggaggcntgcnctctcggctctcgcnttaccgatcgaggcgtggagagaaatggcggcggcagcagcaacaagagcaggagcgtggggcgtggcgtggctcctggcggccaccgtngcggcggcgctgntggcctcggcgtnggcncagtccgggtncacagacaagctgannaac

SEQ ID NO: 3288 - DNA, 233 bp, Zea mays
  misc_feature: Incyte ID No: 700161971H1
cgtcgttgctagccaggtgctggatccgtagcggcggcggcggccatggacaagagcatgctcggcgacctggacggcctccccgaggaggacaagatgcggatggccgccatgatcgaccagctccagatccgcgacagcctgagaatgtacaattcgctggtggagaggtgcttcacggactgcgtggacacgttccggcgcaagaacctggacaagcaagaggagtcgtg

SEQ ID NO: 3289 - DNA, 232 bp, Zea mays
  misc_feature: Incyte ID No: 700161972H1
agcagaagcagtagaggcgaccttttttttctgttctctgatcgagctctgaagaccggggatggcgtcctgggcggctctcctggcgctgctgctctcggcgttctcggcggcggcgcactggacgagaggttctacggccagtcgtgccccagcgtggaggacgtcgtgcggaaggagatggtgcgcgcgctctccgtcgcgcccagcctcgccgggccgctcataaaga

SEQ ID NO: 3290 - DNA, 233 bp, Zea mays
  misc_feature: Incyte ID No: 700161977H1
  unsure 49, 173, 175, 181, 183, 190, 194-196, 204, 207: a, t, c, g, or other
ggcgatcgtgtacgccctggtcgcgcggggcacggtggtgctggccganttcgccgccgtctcgggcaacgccggcgccgtggcccgtcggatcctcgagaagctgccgcccgacgccgagtccaggctgtgcttcgcgcaggaccggtacatcttccacgtcctccgatccnangcggcngnaatcacnttcnnnttaatggnaangacaactttcggaagaaggattcctt

SEQ ID NO: 3291 - DNA, 224 bp, Zea mays
  misc_feature: Incyte ID No: 700161979H1
cccttcaacatgcgggactggtccacggacgtaaacctgtcgtggctgggcatgggcgagctgggccacgtccacgtcggcttcctcaaggcgctgggcctgcaggaggaggacggcaaggacgccacgcgggcgttccccaaggccgcccccaacgccgtcccgggcaagccgctggcctactacgcgctgcgcgaggaggtccagaagcagctgcagaagca

SEQ ID NO: 3292 - DNA, 223 bp, Zea mays
  misc_feature: Incyte ID No: 700161980H1
aaccgatatgtctctagatcgttgtatggtgcgacttgcattggccctacacaacgactgagggcatagtttcccaatgcttttatctagaatcaagttccgtggtttggtttcagttaccaaattccttgaaaatgctttttaagggcttgttcggttgcggcttgcgcctagttcgaaggagattaccttcttttaattttgactagggagggatttaatt

SEQ ID NO: 3293 - DNA, 157 bp, Zea mays
  misc_feature: Incyte ID No: 700161983H1
  unsure 89, 96, 102, 105-106, 110, 113, 121, 135-137, 148, 153: a, t, c, g, or other
gttttgccgccgtagcttacatttgctccccccacgaatttggagggcaatgttttattcgttttgcacatgtatagtgattcctatangcgtgcnaatgantgnngggntangttgctancccggaaagagtgnnnaggagcagccnctaanaaaa

SEQ ID NO: 3294 - DNA, 98 bp, Zea mays
  misc_feature: Incyte ID No: 700161986H1
  unsure 3-5, 9, 39, 42, 53, 69, 71, 77, 97: a, t, c, g, or other
acnnnatgntagactgtcagttttatggttttgtatgtnagnaggtcatccanagacttcgttagatangncctgtngccataggcctagcactaana

SEQ ID NO: 3295 - DNA, 202 bp, Zea mays
  misc_feature: Incyte ID No: 700161987H1
  unsure 29, 34, 36, 41, 61, 64, 73, 76-77, 104, 115, 125, 128, 130, 137, 147,150, 158, 169, 171, 175, 178-179, 197: a, t, c, g, or other
tctgcggctacctcgccgcggtgctcgtnctccncngcctngtcctgccccgcatcccggngcngcctccgcnggnnctccgcgcgctctccgccgcccacaangcggtcctgcnggcgctctcngcngncatggcnggcgggtgcncgntgtcgacngccgcgacggngncggngcnncggtgggagtgggccttnagctt

SEQ ID NO: 3296 - DNA, 229 bp, Zea mays
  misc_feature: Incyte ID No: 700161988H1
  unsure 156, 169, 172, 180: a, t, c, g, or other
gtggctctcaaaggatttgccaagttcttcaaggaatccagcgacgaggagagggagcacgctgaaaagctcatggagtaccagaacaaacgtggaggcagggtgaggctccaatcgattgtgacgcctttaaccgagtttgaccaccctgagaanggagatgctctgnacnctatgganctggctctggccctggaaaagctggtcaatgagaagctgcacaacctgc

SEQ ID NO: 3297 - DNA, 226 bp, Zea mays
  misc_feature: Incyte ID No: 700161990H1
  unsure 34, 107, 118, 133, 142, 157, 160, 190-191, 193, 199, 201-202, 204, 214,216, 221: a, t, c, g, or other
ccccatcatcgcgcccaagatctcggtggcggcntacttcaaccgccgccacacggagcgcaaccagaagacgtcctactccatcactctccagggcgtcgtcggcnccgacggcgcnttcaccgacgtctgnatcggctgncccggctccatgccngangaacaggtcctggaggagtccatgctcaannancgcacngnngnggggataatnangatcntggct

SEQ ID NO: 3298 - DNA, 159 bp, Zea mays
  misc_feature: Incyte ID No: 700161991H1
  unsure 108, 153-154: a, t, c, g, or other
ccaaaagctggctctgatctcaagatcccaattgggaaaatggccatggaggttttgagtggtcagagattcaaagaggcaaaaattgaccctttcgccaaagcaagnaagtcttctcgaaccaatccatttattggggccgacaaggacggnnccact

SEQ ID NO: 3299 - DNA, 226 bp, Zea mays
  misc_feature: Incyte ID No: 700161992H1
  unsure 43, 153-154, 163, 165, 169, 176, 187-188, 196, 201, 212: a, t, c, g, or other
gaccttctttgcttgaatgtcatacatcttcttgaccgcagcnttgatcaggcctgatgggaagaagaaggcttatgtgaaactgacacccgactacgatgcccttgatgtggccaacaaaattggcatcatctaagttaataggcaactggnntcgacagcngngtcntaccagngctgagcatannaacagaantttcnatgcgacgagnaattttgtttgtca

SEQ ID NO: 3300 - DNA, 160 bp, Zea mays
  misc_feature: Incyte ID No: 700161993H1
  unsure 6, 13, 74: a, t, c, g, or other
caaganataagantcgcgatatttattattatcgcgcgtggagtagttggtaaataaatcgcttattgcgagtnttttggcccatgaataaggccttacttactggccatcatttccgacatatatacgtttgttcatgaataaagaaactttgcaaaac

SEQ ID NO: 3301 - DNA, 228 bp, Zea mays
  misc_feature: Incyte ID No: 700161995H1
  unsure 195: a, t, c, g, or other
gatttggctggccaatcaagtagaacaataaagatcaatgaatcttctgaatctgtgactaagccaacagatgtgttaagcaaaaataacggatcagaggttgccaataaagaagggagcaagagctggatgcccaaatttattgtgaaaccgaagtctgcaagcgcagatcctcataagagacagaagattgantccacggctgtccaagacaccgggaaaggccaa

SEQ ID NO: 3302 - DNA, 117 bp, Zea mays
  misc_feature: Incyte ID No: 700161996H1
  unsure 44: a, t, c, g, or other
cgaaaaagtctatgattcctgactcaccaagggtgtcattaganaaagatgttaaaatttcctcgctagttagtccaacaagaagtccaaactccaacaaaattctcctgcatcatc

SEQ ID NO: 3303 - DNA, 97 bp, Zea mays
  misc_feature: Incyte ID No: 700162001H1
  unsure 2, 33, 71, 77, 90: a, t, c, g, or other
gnagattgtcatcaagacctgtggcactaccanagctcctgctcaccattccaagaatccttgagcttgcngaaganctgtctatgccanttggctg

SEQ ID NO: 3304 - DNA, 108 bp, Zea mays
  misc_feature: Incyte ID No: 700162003H1
atgaggtctatggttttggtggagtgggtatggtcgttgaagttctaactgacaaaattacaagatcagttgctgacattagaaacgtggtgaaagactgcggacaaa

SEQ ID NO: 3305 - DNA, 109 bp, Zea mays
  misc_feature: Incyte ID No: 700162008H1
caaatgcatctcttgtatcgctaagagtcttagctgtgaacttagttctcacttctgtgtgactgtgatcaaaggagatccatcagttggtaccgaagtgtattttatg

SEQ ID NO: 3306 - DNA, 244 bp, Zea mays
  misc_feature: Incyte ID No: 700162009H1
acctggtcggcagtaagctcaacttctcaatgatccatggagaactaaggcttcttggtggatggcccctctttgtgaagagccaccgtatcgaagcaggacacgtgtgtgctttcatgttccaggaagaggaagaggaagagggcgaactgtcacttagggtgcacgtgctgggtactatgccagtgccaacaatctagcctttgcttgtttcgttgatgaggcacgggatgaacgtcgctaa

SEQ ID NO: 3307 - DNA, 246 bp, Zea mays
  misc_feature: Incyte ID No: 700162012H1
  unsure 73, 96, 103, 106, 134, 151, 162, 168, 183, 244: a, t, c, g, or other
caaagaaacatcatgttgtttcttcaatcagagctagatgcattccacgtgacagtttggatgaacacattgntatccacatggatggtggaaatntcttggnagncaattatggcgctgttgatgggtgccantaccctaggcctatganattgccatcanaatggncattcagctcttacnctatcctaaagactgctgaacaggcaccaagaaccccatcgtttgcagatcagttaatagnag

SEQ ID NO: 3308 - DNA, 82 bp, Zea mays
  misc_feature: Incyte ID No: 700162013H1
  unsure 61, 75: a, t, c, g, or other
gccgacgacgacgccgagctcaaggccaaggccaatgccaaggccgaggtctactacggcnacgaggcctgtcanctgtgtc

SEQ ID NO: 3309 - DNA, 101 bp, Zea mays
  misc_feature: Incyte ID No: 700162014H1
  unsure 10, 100: a, t, c, g, or other
ggccccaaanaatcgccatggactcctccaccatcctccgggcaccacccatttgaatgggccagttgagtgtatgcgggccgggggtgaaaggaacatnt

SEQ ID NO: 3310 - DNA, 115 bp, Zea mays
  misc_feature: Incyte ID No: 700162016H1
  unsure 11, 28, 34, 41, 48, 60, 63: a, t, c, g, or other
gcggtgggtcncgggcgggcttccctcngagatngtttctntcttccnacaagcaagcgngtntcctccgccggctctcggatgcaacccggcttgcagcgcgttgcgtaacctg

SEQ ID NO: 3311 - DNA, 79 bp, Zea mays
  misc_feature: Incyte ID No: 700162017H1
  unsure 34, 47, 53, 62, 68, 77: a, t, c, g, or other
cattgtacaatcaagacctgtggcactaccaagntcctgctcaccantccacngaatccttnagcttnctgaagagntg

SEQ ID NO: 3312 - DNA, 75 bp, Zea mays
  misc_feature: Incyte ID No: 700162019H1
  unsure 2, 9, 12, 17, 32, 36, 40, 51: a, t, c, g, or other
angaggtcnatngtttnggtgaagtgggaatnatcnttgnagttctaaacngacaaaattacaagatcagttgct

SEQ ID NO: 3313 - DNA, 97 bp, Zea mays
  misc_feature: Incyte ID No: 700162020H1
  unsure 31: a, t, c, g, or other
tgatgctgtccctgtcgagggcgatcgggangcggctcttctcgtccgccgaggccgcgtcgacggctgcggtgaggacggcgcagaacccgctcga

SEQ ID NO: 3314 - DNA, 237 bp, Zea mays
  misc_feature: Incyte ID No: 700162023H1
  unsure 119: a, t, c, g, or other
cattttcacaagtgacgtgcccgtgatccaagtcattcacagaggcatcccgtttgtcgccggcacgcagaccatcaattccctggccttcgtgtttgatggcatcaactttggagcgncagactacagatactctgcttactccatggttgctgttgcgtctgtgtcgataccgtgcctgctgtacctttctgcgcataacggattcatggtatatggatcgcttgacgattacat

SEQ ID NO: 3315 - DNA, 78 bp, Zea mays
  misc_feature: Incyte ID No: 700162024H1
  unsure 4, 6, 13, 35, 45, 50, 59, 66, 77: a, t, c, g, or other
cttncnccatacntgcaatttgatttatgatttgnggacatcctngctgnaacacaccngctgagntatcttagttnt

SEQ ID NO: 3316 - DNA, 240 bp, Zea mays
  misc_feature: Incyte ID No: 700162025H1
cagagcgaggcgacgccgaggcacctcatctccggcgaagggaaatggcgaccgttccaggggatctgatctggcagattgtgaggaagaacaactccttcctggtgaagcagtttggcaacggcaatgccaaggtgcagttcaccaaggagcccaacaacctctacaatgtacactcctacaagtactctggcttagcaaacaagaaaactgtaacgatccagccagctgctggaaagg

SEQ ID NO: 3317 - DNA, 67 bp, Zea mays
  misc_feature: Incyte ID No: 700162027H1
  unsure 3, 6-7, 39, 46, 56, 60, 65: a, t, c, g, or other
ggnctnngttcgggagtgaagccgcatgattgaggaganctatggntcgtggtacnggangaacncc

SEQ ID NO: 3318 - DNA, 240 bp, Zea mays
  misc_feature: Incyte ID No: 700162030H1
  unsure 211, 215, 217, 223, 226, 229, 231, 235: a, t, c, g, or other
gaaaacgaggacggagacggggctggtgctgaggatatgaacatcaattgaagtggactagtggagtggaatgcctgctcagattggttgatgagcaagtcgtcactatatgtcaagtgttgtagtttgctttgcaattattggaggaattaaatgatcgtctgctgggttcatgagtcgaacatttgatatatatggcctattatttacnatananattttnatnacngngganaaaaa

SEQ ID NO: 3319 - DNA, 245 bp, Zea mays
  misc_feature: Incyte ID No: 700162031H1
ggcattgttgaagttgcaaagataatttatggagtgcatgacgaagcgaaggacaaagcttttgagttggagttgagctggatctgtgatgaatcgaaccgtcagcatcagaaggttccaaatgaactgttggagcaggccaaagctgctgctcaggcagctcttgaggagatggatgctgactaagaaacaggacgatttgcccagacttggtgtttttggtgctgttgaaatccccgatccct

SEQ ID NO: 3320 - DNA, 247 bp, Zea mays
  misc_feature: Incyte ID No: 700162032H1
  unsure 238: a, t, c, g, or other
ctgagcatttcatcaaagaaggtctgactagccttgttgagtacaatgaaaagaagatgtttgaagttaaacttaaagagataaagtcaacactgaccactatgatcaatgatgaggctgcaatacctgaagtgattgagactgtcaaacagcaagttaaggatgctaaatttcctgatctagaggtcattcgcatgttgtgggatgtgctcatggaggctgttcagtggctgggaanaaccagcaa

SEQ ID NO: 3321 - DNA, 71 bp, Zea mays
  misc_feature: Incyte ID No: 700162033H1
cgcatggaacgaccactggatcttctgggttggccccttcatcggtgctgctcttgccgccatctaccacg

SEQ ID NO: 3322 - DNA, 228 bp, Zea mays
  misc_feature: Incyte ID No: 700162036H1
  unsure 35, 119, 130, 147, 183, 186, 195, 197-198, 200, 207, 212, 222, 226-227: a, t, c, g, or other
gcaagatgacggaaaatggatcgagtttgatgatnacaacccaaacatccgcaaggaggaagacattttgaaactatctggtggaggtgactggcacatggcttatatctgcctatacnaagcccgcatngcggagttgaagagttnggccggagtggttctacattctgtgccgcgaacgcnacnttatttttncnncnctggggnctggnaattttttcncgtnnc

SEQ ID NO: 3323 - DNA, 233 bp, Zea mays
  misc_feature: Incyte ID No: 700162037H1
  unsure 157, 197, 207, 210, 212, 219, 231: a, t, c, g, or other
cgcgtccgctgtgtgctctctcgctctctcggcggaagttggcgacgactgggcgaccgccgccgccgtacgccaggtgctcaggtctccgtcagacccttcgccaggtcttcttcggcggcgagcaccgccagggtgtgcacccaatcttcttcantgggtcctccgctgcttctagtcacgcatctaaatccggngttgccaganttngnttaaggnccggaccaaaanaa

SEQ ID NO: 3324 - DNA, 66 bp, Zea mays
  misc_feature: Incyte ID No: 700162039H1
ctgctacaccaacttatggcatgtataagtgtactaatacatggtcatcagcatgatacattcttt

SEQ ID NO: 3325 - DNA, 105 bp, Zea mays
  misc_feature: Incyte ID No: 700162042H1
  unsure 13, 15: a, t, c, g, or other
agaggagctcgancntggagagaagggcattggtgatgggacagtgagctatggaatggatgatgctgatgacatctacatgcggtcatggactggtaccatcat

SEQ ID NO: 3326 - DNA, 233 bp, Zea mays
  misc_feature: Incyte ID No: 700162043H1
ctgatgagtggatgtatagaggtgcggtctacatgaatgcaccagacggtaatattgatggtctggaaaggtcacggttgggacctattgtccatgctaaatgtcgatctgggcccagcaatacttagggtgggcatggctgggatgacttgatagctttttttttccgttgcggctgtaggcatgacctgtaaactactggagactcagaatttggtatggttagatttttt

SEQ ID NO: 3327 - DNA, 235 bp, Zea mays
  misc_feature: Incyte ID No: 700162044H1
gtttcaagatgaggagatgcctgatgtcaggaaattggacatcagaaacttcctgtaggcctgatcgacgataatctttgaggcccaacgcacctctggttttggtttcaagttgatcggtgctccacacctatgaatgctgctgcttccctttttgtaataaaagaaactgcacggttgggtatgagttggattaaatcttgcctttctgttgctctggactcttgtggctgca

SEQ ID NO: 3328 - DNA, 94 bp, Zea mays
  misc_feature: Incyte ID No: 700162045H1
cggtgatctgtattcttggggttcaaatgaaaatggctgccttggtctggggtattttatctgtgactttttcaataatttccctacatcatct

SEQ ID NO: 3329 - DNA, 241 bp, Zea mays
  misc_feature: Incyte ID No: 700162047H1
  unsure 240: a, t, c, g, or other
cgtctggtcgttcttggacgtgtttgagttgttggctggctactactcgcgatacggcctctaccatgtcgatttccaggacccggagctgccgaggacgccaaaactctctgcgctgtggtacggcaagttcttgaagagtgaaatcgacgacataatagagaacgttgtcgtcagcgctactgacgacgcgcgctcgcatgctgctgaacaatgagttagattgctagcgagcagcanc

SEQ ID NO: 3330 - DNA, 242 bp, Zea mays
  misc_feature: Incyte ID No: 700162048H1
  unsure 241: a, t, c, g, or other
gaaaagctaaacccgacctccgctcgccggcgcccggcaggatggcttcgtcggcggcgtaccctgatgcggacgagaacctggaggccatcatcacccgcatagagcagaagtcccgaaagatcgagacccttctcaagcagtcgaagccggtggaggccctaaagacggcgctcgaggggtcaccgctcaagacccgcgacgagcgatgcaatcggcgaactggatctggtgcaccgcnc

SEQ ID NO: 3331 - DNA, 71 bp, Zea mays
  misc_feature: Incyte ID No: 700162049H1
  unsure 30: a, t, c, g, or other
gcgccatcatctttgtgcccatcgtcgtcntctcatggttcccctttgtgtcaacattccagtcacgtttc

SEQ ID NO: 3332 - DNA, 73 bp, Zea mays
  misc_feature: Incyte ID No: 700162051H1
  unsure 72: a, t, c, g, or other
ggctgcccagctgaaagaatgtgaaacactgatccctttgcgtctgtggaccttaaagcatggctgttctana

SEQ ID NO: 3333 - DNA, 237 bp, Zea mays
  misc_feature: Incyte ID No: 700162053H1
  unsure 63, 111, 139: a, t, c, g, or other
ctcattattattctcactggtcgatctgctaacacaaacagcagcagctcctcctcactagcnagccttctctatttttgctactgcaagtgtccaagtctgcgacgacgnccgagatgtcgacggtgagccgtgcatnccttgaccagaagcttgccctcgccaagcgctgctcccgagaggcgactcttgccggagctaaggcggcagtagtggcgactatcgcctccgcgattc

SEQ ID NO: 3334 - DNA, 125 bp, Zea mays
  misc_feature: Incyte ID No: 700162054H1
  unsure 55: a, t, c, g, or other
ggacatcattgccctcaagtacgccgagctggtctatgctggccgctggtttganccgctccggcagtcctttgatgccttcatggagaaggttaccgcgacgaccactggttcagtgaccctga

SEQ ID NO: 3335 - DNA, 235 bp, Zea mays
  misc_feature: Incyte ID No: 700162056H1
cagtggcgtggtcgttagctactttgaatgggtgcagaacattcaaggtttcatgtgggatgaggagaaagttaatgatgaactagaaaagtacatgagcagtgcttttcaacacttgaaggccatgtgcaagtctctggattgcgaccttaggatgggggccttcaccttaggagttaacagagttgctcgtgccaccctcttgagaggctgggaggcatgagaccattgacca

SEQ ID NO: 3336 - DNA, 102 bp, Zea mays
  misc_feature: Incyte ID No: 700162057H1
cattttccatttttttttggagagagaggaaacgggctggatcaatataattttgaaaaagcgataaacagaaacgaaggggatttcacagtttcagttacc

SEQ ID NO: 3337 - DNA, 239 bp, Zea mays
  misc_feature: Incyte ID No: 700162058H1
  unsure 10, 84, 94, 112, 120, 146, 161, 174: a, t, c, g, or other
gctccgggcncttgctactattgggttgccgcaaggtgtgcaaatgttgaaaattttcaaggaacagcctcagggaacatcaantctggatgantttgatttttatgaaganaaggcgantgcacgccgcacccaaaagagagganattcagagtcgacanatggagctcgatnctctgatgactcgaaatctatggaaaatttggaggcaaacatggagagttggagtttgttcgaga

SEQ ID NO: 3338 - DNA, 240 bp, Zea mays
  misc_feature: Incyte ID No: 700162059H1
gcaagcggccaccatggacacgcgcgtgggcagcctcaccgtgccgccggcgtcgctccccgtcttccctgtcacgttcatcatcatcctcacgcccgtctacgatcacgtcatcgtcccgttcgcgcgccgcgtcacggggaccgagatgggcatcacacacctccagcgtatcggcaccgggctggtgctgtccatcgtcgcgatggccgtggccgccgtcgtcgaggtcaagcgcaa

SEQ ID NO: 3339 - DNA, 239 bp, Zea mays
  misc_feature: Incyte ID No: 700162060H1
  unsure 206: a, t, c, g, or other
aaaaggatcagcgttataaggaacttggtttaagagacaaaatcacacttagtagtggccgttttgtccttggtaacaaatacgcacggacgtttatattcttctacagcatcggattgcatctccttgtatttacattactgtacagaatgtccgctttgagctatctcaacacaactcagcaagatgaaatcattctggatgcnggtaatcagaggctaacgcacatgctttaggcc

SEQ ID NO: 3340 - DNA, 151 bp, Zea mays
  misc_feature: Incyte ID No: 700162062H1
  unsure 2, 103: a, t, c, g, or other
anagaatactcgataattgtgccacgaacggtactagagtttgcacgaactgtagactacatgtacaaggaagctgataagtacactgtctcccatacaatcnaagacatgttaacgtcgctttatgtgaagccggtactcatgtgaaggt

SEQ ID NO: 3341 - DNA, 108 bp, Zea mays
  misc_feature: Incyte ID No: 700162063H1
  unsure 61: a, t, c, g, or other
gccagggacaaatttggctctttctttgggccatccaagccggtgatttctcgtcgagtgntagaagaaagaaaatcattgaaagaactgcataacacggttgcaagg

SEQ ID NO: 3342 - DNA, 196 bp, Zea mays
  misc_feature: Incyte ID No: 700162064H1
  unsure 149, 191, 193-194: a, t, c, g, or other
ccctcacgcaactgcctctttgcggcggcgggaaacactgacacgtcttctctccggttgcgagcacggtcggaggagctagggtttcgtcgcggcgagatgtcggcgtacgacgaggtggagatcgaggacatggagtggaagcggantgaaggcgtacacgtacccgtgcccctgcggcgacctcttcnanntg

SEQ ID NO: 3343 - DNA, 77 bp, Zea mays
  misc_feature: Incyte ID No: 700162065H1
gtctccaacttcaggaacgcctgggaaaatatggacccagatagtgagcgtgtcgatgagtatggactcggggttag

SEQ ID NO: 3344 - DNA, 235 bp, Zea mays
  misc_feature: Incyte ID No: 700162066H1
  unsure 50, 53: a, t, c, g, or other
gcgccggcgcgagctgcaggcgttcgacgacacgaagctgggggtgaaangcntggtggactccggcgtcaagtccatcccgtccatcttccaccacccgccggaagccctgagcgacataatttctccggcgcctctgccgccgtcgtcgtcgccctccgccgccgccatcccggtggtggacctctcggtgacgcgccgcgaggacctagtcgagcaggtgaggcacgcggcc

SEQ ID NO: 3345 - DNA, 77 bp, Zea mays
  misc_feature: Incyte ID No: 700162067H1
  unsure 6, 61, 74, 76: a, t, c, g, or other
gataantgaaaagttgactgttgtttacaaatccaattatgatggtggtaatttggagctnagtttcacgtcgntnc

SEQ ID NO: 3346 - DNA, 54 bp, Zea mays
  misc_feature: Incyte ID No: 700162070H1
  unsure 21, 27, 35, 45, 49, 53: a, t, c, g, or other
gcagacccctccccttcgctnccttcnctagcgcngacgcccacnagangagnt

SEQ ID NO: 3347 - DNA, 231 bp, Zea mays
  misc_feature: Incyte ID No: 700162072H1
  unsure 174: a, t, c, g, or other
caaatgttcgagggcatgggtctaggcggctgcatcgttcaggccaagttcaagctgcggtcgatcgtgaccatggtgctcttcttctgcctgacgacgccggtgggcatcgtggtgggcgtcgggatctcgtcggtgtacgacgaggacagcccgacggcgctggtcgtgganggcgtgctcaactcggtggcggcggggatcctcgtgtacatggcgctggtggacctg

SEQ ID NO: 3348 - DNA, 232 bp, Zea mays
  misc_feature: Incyte ID No: 700162073H1
  unsure 101: a, t, c, g, or other
gtccacgcgcttcctcccctctcctctgtgcctcttttctccctcctcggtgctcctccaccagaaccctagctgccgtttcccactctcgtcgggcagcnctctcagcagcacctgcggccgttgtctctccttgcgcggtctgccccagccctgacccccggagatccggggctgttctcggttctttacgcggaggcggaggttggtttctgatctggggatcggttcg

SEQ ID NO: 3349 - DNA, 232 bp, Zea mays
  misc_feature: Incyte ID No: 700162074H1
agagaccagctgtgagttgggctctgaacgtttcttccatgttcaattcgattgaacatgactgttttgattagctgttctgttctgtttattttttatttctcacaatttactggctgcagcgtgagttcgtctagtattggtaaaaccttctgctgttggcagaaacagagtctcactctacaaatactgcaccaaaccctgatctgttctattcccttttcctgcaaat

SEQ ID NO: 3350 - DNA, 123 bp, Zea mays
  misc_feature: Incyte ID No: 700162077H1
  unsure 108, 114, 117: a, t, c, g, or other
ggctctcgcgaggcttgttgagatcattaagatagattatatcaacgaggctctcgcgaggcttgttaatcgagatgtgaaataccgctttgtaatcgagatcggganctcctncangtagcg

SEQ ID NO: 3351 - DNA, 55 bp, Zea mays
  misc_feature: Incyte ID No: 700162079H1
  unsure 31, 38, 43, 49, 52-53: a, t, c, g, or other
cttcgaacatgcaataggttttcgagtaaanaaaaaanaaaanaaaaanaannaa

SEQ ID NO: 3352 - DNA, 70 bp, Zea mays
  misc_feature: Incyte ID No: 700162080H1
  unsure 9, 15, 18, 36, 45, 61: a, t, c, g, or other
cctagctcnatagcncgngtattgcttgctctccanaagaaacanggcagagcagcaacantggccgcgg

SEQ ID NO: 3353 - DNA, 70 bp, Zea mays
  misc_feature: Incyte ID No: 700162082H1
agctctctcattgccaaattgcccccgactcaagccccccgcgccgccggcgttggtggaatcgatgcga

SEQ ID NO: 3354 - DNA, 222 bp, Zea mays
  misc_feature: Incyte ID No: 700162086H1
acgacggggagatgtttctgcgacggatcctgaccggcggaggtggcctggcggcgctgagggcggcgcgcgccgtgaaggagacgacggggatcgtcggccttgaggtggcgcccaacgcgcgggaggttctcatcgggctctacacgcgtacgctcaaggagatcgaggccgtccccaaagacgagggctaccgcaaggccgttgagtccttcaccaatc

SEQ ID NO: 3355 - DNA, 224 bp, Zea mays
  misc_feature: Incyte ID No: 700162087H1
ggtggactgagggttcttaactcctactgggtgaatgaggatagtacctacaagtacttcgagatcatccttgtggacgttgcccacaaagccatcaaaaccgacccgaggatcaactggctatgcaaccctgtgcacaagcaccgcgagctccgtggcctcacctcagcaggcaagaagtaccgtggcctgcggggcaagggccacactcaccacaagaacag

SEQ ID NO: 3356 - DNA, 224 bp, Zea mays
  misc_feature: Incyte ID No: 700162089H1
  unsure 46, 58, 61-62, 91, 94, 126, 183: a, t, c, g, or other
gccttcgacgggccgtccatcctgccggccgacccccacgaccgtnccgtcgcccgtntcnnggcgaacttcttggacaccaagttctccnagncgttctggctggcgtactgggcggagggcgangcgcagaaggccgtggtgaaggaggccaaggagaacctggcgctcctggaggcgcantcggcgggaagagcttcttcggcggcgacacgcccgggtac

SEQ ID NO: 3357 - DNA, 227 bp, Zea mays
  misc_feature: Incyte ID No: 700162090H1
gggaaaaacaaccctgagcttgccaaagagatggagaagcaatttgtcgatcttcttaatgaggaactcaagctgcagcaggttgtagctgaggagcatagtcaccacatgaacgccactcttgtcgaagcaaaaagacaagctactcaataccagcgagaagccgaaaagtgtaatgcagctacagagacctgcgaggaagctcgggagcagtctgaagtagcaat

SEQ ID NO: 3358 - DNA, 71 bp, Zea mays
  misc_feature: Incyte ID No: 700162094H1
  unsure 63: a, t, c, g, or other
gatgattctgaggctatcaatcattttcatgatgattctgaggctaccaacgaccttcatgtnggcaaggg

SEQ ID NO: 3359 - DNA, 174 bp, Zea mays
  misc_feature: Incyte ID No: 700162095H1
  unsure 57, 72, 88, 93, 144, 151: a, t, c, g, or other
ggacaatttgtgattttttctcctttatgccatgttttggaatttttgtagctgccnaggccttgtggtaangtgctgctgtgggggntcatnagtatgaagaggaagacgctgctggcgcggagtctttttcgctttattagnattttgnttaaaactatgtatgaccgaatg

SEQ ID NO: 3360 - DNA, 242 bp, Zea mays
  misc_feature: Incyte ID No: 700162109H1
  unsure 16, 34, 65-66, 70, 106, 120-121, 152, 198, 209, 224, 228, 236, 241: a, t, c, g, or other
gtcaaatggcaagacntctggaggctcaagtganaaaagtgaaccaagtgcatcagtaggattannttcncgcaactttgacgagcttgttgtcaaaagcaagganctttggattgtggnnttctttgcgccatggtgtgggcactgcaagnaattggcacctgaatggaaaaaggctgcaaagaactttaagggccnagtgaagctanggcatgttgattgcnatcntgaaaaanccctng

SEQ ID NO: 3361 - DNA, 243 bp, Zea mays
  misc_feature: Incyte ID No: 700162113H1
  unsure 13, 41, 61, 66-67, 109, 112, 114, 130, 134, 140-141, 153, 170, 204, 222: a, t, c, g, or other
cttacggcctgangcgaggccaggtcgtgaagatcatcagncccagcgagacggcgggcanatacnntacataccgctacgttgtatgacagaacttcagaacacttangangnagaagagaaccacagntatntcaaannaaattcaagctncacataccccacgtgcntgcagacatcagtatcgttttgtagcagcagccnctggtaacgatctgtggntgatgtgtaagtggattgaat

SEQ ID NO: 3362 - DNA, 131 bp, Zea mays
  misc_feature: Incyte ID No: 700162115H1
  unsure 9, 12, 68, 82, 85, 95, 107, 116, 124: a, t, c, g, or other
caatatgcntantttggttgaccatttccacgagcgtggtcttaatcgctcaatattcctcagcatantggaagtagaggantcnttgtcacgtnattctcctgganttgttgcanatacgtcnagtgctg

SEQ ID NO: 3363 - DNA, 106 bp, Zea mays
  misc_feature: Incyte ID No: 700162117H1
  unsure 3, 15, 20, 37, 70, 78, 80, 91, 96, 100: a, t, c, g, or other
ttngttcagagaatngctantctctagattctgtgcnacccctgttataaccctaaaattgtagtgctancaacactncnatcagttcgtntagcntggntcgttt

SEQ ID NO: 3364 - DNA, 103 bp, Zea mays
  misc_feature: Incyte ID No: 700162120H1
  unsure 16, 26, 46, 49, 56, 71, 80, 86, 89, 92, 98: a, t, c, g, or other
agtaaacccgaataanaatgtatatnttgttttggaatttgggagntgnacaaaanccttttgttcaatcncaaggtggncagggnttngtntggccnacttt

SEQ ID NO: 3365 - DNA, 238 bp, Zea mays
  misc_feature: Incyte ID No: 700162121H1
  unsure 18, 27-28, 34, 36, 53, 63, 105, 150, 160, 169, 173, 175, 189, 202,214-215, 221, 224, 235: a, t, c, g, or other
gtgtgatgtagcagtatntgtttacgnnagctgngntgaatattcatgggcanatatctaganacttgtcttgtgcaagtgggctacacatggagaaaatactgnctactaagttccgtgcttgatagttgctgcgaaagatgatcttgncccatcttcncaagctctncaanantcaactagagtganccaagacattggnattgaaacaccnnttccgntcntgtgaaactgngag

SEQ ID NO: 3366 - DNA, 147 bp, Zea mays
  misc_feature: Incyte ID No: 700162123H1
acatgacatgatattatccacgtgaaactgacaggtcaggataccattccctcagagagaacgacacacttggggcatcttaggaccgttacttgcgcaatgggatggcctccgtcggtgcaaatgacacttctagggctgccgggt

SEQ ID NO: 3367 - DNA, 148 bp, Zea mays
  misc_feature: Incyte ID No: 700162124H1
  unsure 71, 110, 123, 127, 143-144: a, t, c, g, or other
caagcactgcaaagtgatctttggaaagctgacccgtggcgccacctgcctgaagagcagcctggtggtcntcgcgctcgctgttgctgctagttacgtgctgtcccctngcgtggacctcgngaanggtccaggcgatgtcnnatcg

SEQ ID NO: 3368 - DNA, 239 bp, Zea mays
  misc_feature: Incyte ID No: 700162129H1
  unsure 76, 80, 109, 161, 164, 171-172, 229: a, t, c, g, or other
aatttaatgtacctttcacggaagccctcactaacattaattgtgtgtatgtttcatctcagcttgatgactgaanatanctagggccttgcagggaaaccttcgttgncttctgaggtactgaaggttagtgaagaggcagatgattacgttccaaatangangtcttgnnatactgctgtgacttgtgttttgaaataggtatagtattttctggttctcttgcaancctccatttt

SEQ ID NO: 3369 - DNA, 240 bp, Zea mays
  misc_feature: Incyte ID No: 700162130H1
  unsure 6, 9, 66, 78, 101, 108, 144, 155, 166, 190-191, 198: a, t, c, g, or other
ggtagntcnggtgaaagctcatcgcaaacatgtcgacgacgactcatcaaagagggaaagaagatnctacgtcttcgncaatctcccagtgcacatgcagntggttanccgcccacaactggcagagcaagctagcttcgtcancacccacaggntccgagtcccnctatttggctgactccacggtggnnccctagncaattactggaggaacaagcttcagctcttgtgggtgctata

SEQ ID NO: 3370 - DNA, 139 bp, Zea mays
  misc_feature: Incyte ID No: 700162131H1
  unsure 111, 133: a, t, c, g, or other
ctcttgagttctcattgtctggatcatctttgtctccttggatgtgttgcatcttttgagtgtggaaatggatggtactcctcgccatgaatttgctggctactttatacnttggctttgtaactctgtttgntgataa

SEQ ID NO: 3371 - DNA, 229 bp, Zea mays
  misc_feature: Incyte ID No: 700162137H1
  unsure 70, 162: a, t, c, g, or other
gtgaccaactcgaagcttgcgttcttgtagtagaggtcggcagcaagcggtagagcgagaggtcgagaanatgaagagcagcactctgttggcgatcctagttctccaggcccttctggtctctacggccgtggccaaaggacctgcagggccgaagaagcngtgctggtgcggcgagtgcaccagctggtcgggcgtgtggacctgcgacgacctcctcaccaagtgc

SEQ ID NO: 3372 - DNA, 228 bp, Zea mays
  misc_feature: Incyte ID No: 700162140H1
  unsure 155-157: a, t, c, g, or other
ttcactggtagcagcaatgatggatcgaacagcttctaacgaagctgctgaaaagaagaggaagctggagatgctagagaagcaatacatcgatgaactgaagaaggaaattgatggcgttgctttctctagtttgtcaaacaaggaagcagatnnntcaccgaatgcaaaagatgatactcagtcagatcgtgaggaggatgccagtaaacaagaggaggatgatga

SEQ ID NO: 3373 - DNA, 229 bp, Zea mays
  misc_feature: Incyte ID No: 700162145H1
  unsure 210: a, t, c, g, or other
aaatcaacggagaagtctccaaaatctggtgggtcagtcccttgcaaatcatgcagcaagacattcaatagtgagatggctctgcaggctcactccaaggcgaacatggggccaaatgagttgcaggtccaactgagtccatgaaggagaagcatggtggccaagtgagtcgcaggtccattcgagtccatgaaggtgaagcatgggagntccaagcgagtctggaaag

SEQ ID NO: 3374 - DNA, 233 bp, Zea mays
  misc_feature: Incyte ID No: 700162147H1
  unsure 29, 36, 43, 113, 121, 126, 139-140, 144, 146, 194, 203, 205, 220-221,226: a, t, c, g, or other
ggccaaggatgaggggtcccaaaagggcntccaagntcaggangctgttcaatcttgcaaaggatgacgacgtgcgcaagtacgtgaacacgtacctcagacattcactaccnagaatggnaaganggtgagcaaggcnnctangntccagcggcttgtgacccccttgaccctccagaggaagcgtgctatanttgctgacnanaagaagaggatcgtnngaagnaaactgt

SEQ ID NO: 3375 - DNA, 241 bp, Zea mays
  misc_feature: Incyte ID No: 700162151H1
taatttcagttttacagagaggtttgccgtgaagtatgctggtgctgcggccatgtacatggtatctaagaaactaaagaagaaatacaacataactgacgagcgtgcttcattgtatgatgctgccaatacatggatcgacgcactgaacggaagagatttcctgggtggctccaagcctaacttggcagatcttgccgtcttcggtgttctgagacctatccgatacttgagagcagga

SEQ ID NO: 3376 - DNA, 239 bp, Zea mays
  misc_feature: Incyte ID No: 700162152H1
acgggatgttctgttctccctatcacggtaactatatgatgatgatccttgctttaattcatgaacacttgtttcaagattatgtccattacattttgcttgcattgtcaagattgtggattcttggtgttcatgacgttgtaatgttaatgaacggctggtaacgccatgtggtactggtacccctgtattttcagttgctgtggcaccttggctctctctttgaaaaaccagtatgt

SEQ ID NO: 3377 - DNA, 238 bp, Zea mays
  misc_feature: Incyte ID No: 700162153H1
  unsure 8: a, t, c, g, or other
ggcctgantatgcccaaaagtacaagactctaatctacctcgcaggatctgcatctgctgaggtaattgctgatgtggctctctgcccttttgaagctgtgaaggtacgtgtgcagacacaacctggatttgctcgtggattgagtgatgggctccccaaatttgtccgatctgagggtgttcttgggctctacaagggaattgttcctctctggggtcgtcagattccttataccat

SEQ ID NO: 3378 - DNA, 236 bp, Zea mays
  misc_feature: Incyte ID No: 700162157H1
ctcaaggacacgtctggcccttccctcaacatcctcatcaagcttatggcggttgaatcccttgtcttcgcccccttcttcgccgcccatggtggcattctcttcaaatggctctaagccagcgagagacgcaggataaaggccgtagttttgcaaggcgagtagagcagtatgtcagtaatacagcatctatggcatgtgcttttgctcgtccagttcatgagccccgttgtgta

SEQ ID NO: 3379 - DNA, 235 bp, Zea mays
  misc_feature: Incyte ID No: 700162158H1
gacgttgggaaggacgcatacgaagaggtagatttagtcaccaagggtggaaactacggatggcgtgtatacgaggggccatacatctttcacccgcaaaagtcgcctggagggaatacttcgcctgagtccataaacgcaatcttccccgtcatgggctacgaccattctgctgtgaacaaggaaatcgggtcagcatcgatcacaggcggatatgtgtaccgaggttccgctg

SEQ ID NO: 3380 - DNA, 238 bp, Zea mays
  misc_feature: Incyte ID No: 700162159H1
  unsure 79: a, t, c, g, or other
gaaaatagaaaataatgaaattataattgacgcaccagatgagaaaacagaaaataaagcagatgctgacacaccagcnggggagaccaaagaaggtgaaactacagtagaggaaacagatgagaaaatagaatctaaagttactgctgaacctgtaatcggggagacaactgaaggtcaaactgcagctggagaaccagttgaagaagctagaacagctgaggacatggtagaagat

SEQ ID NO: 3381 - DNA, 237 bp, Zea mays
  misc_feature: Incyte ID No: 700162160H1
gaaagccatggcgattggttctctgatcgcctctactttcgccagatctagccatgccctccccgctgccgccgcttcggccatctctcaggctcccagatcccagcacaccgcatctcctctactctccggccttggagcagcggctcgtgctttcagctcaagggctctatggaagggagcattcgttgacgctttcctgtctagaattaagaagaacagagaaaatatgaatgg

SEQ ID NO: 3382 - DNA, 129 bp, Zea mays
  misc_feature: Incyte ID No: 700162161H1
  unsure 16, 95: a, t, c, g, or other
gctatggcgaaccctngcatgccagaaatggtggccttcctcaactgtctggccttaaacaaacagaacgatgacaagtgtatcaagcagaaagntcttttggttgcatgctctcaggctcagaatggg

SEQ ID NO: 3383 - DNA, 236 bp, Zea mays
  misc_feature: Incyte ID No: 700162162H1
  unsure 61, 104: a, t, c, g, or other
gaaacctcagacactctacatatatcctctgcgcgtgtatctcgtcgtacagagccgaaanctggagcttccaatggcgggagacaacgacctgaaggtgctcngcgtgtggacgagcccgttcgtgatccgggtccgcatcgtgctcaacctgaagggcctggcgtacgagtacgtggaggaggacctcagcaacaagagcgcgctcctcctggggtccaacccggtgcacaaga

SEQ ID NO: 3384 - DNA, 240 bp, Zea mays
  misc_feature: Incyte ID No: 700162163H1
ccccacctcgtcttcgttctgctcctaccaattccagtcccagccatccgcccgcccaactatggcggcaacggctctgctactccccagcctcgcggcgctcacggacacgccgcgccgcgcccacaggttgctgcagccgcagctccagctccagcgcggctcccttgtctctcggtccctccggcctccgcggcgtcggcggctcgcggtctcggccgtgcaagagacgaaggaggg

SEQ ID NO: 3385 - DNA, 235 bp, Zea mays
  misc_feature: Incyte ID No: 700162167H1
  unsure 234: a, t, c, g, or other
ccatttctttagcaatgtttgtgagctcgatttagtgtttaattttcacaaggtttacctgatactagatgaatttattcttgctggggagctgcaagaaacaagcaaaaaggcaataattgagcgaatgggtgaactggagaagctggaatgacgaagaccaggaagatgctgccgcgtgtgttgtattccaatttgtattattcgtttcaggtgttttacatttgctctccng

SEQ ID NO: 3386 - DNA, 234 bp, Zea mays
  misc_feature: Incyte ID No: 700162168H1
  unsure 121: a, t, c, g, or other
caactgatgaaggccttgaacaggacactgtggatgctgttaatcctgaggagactactgccgtggtggaggatgagaagaaacctgaagatgcaccacagtctgaggttgagaaggacanggagggcgcggagaatgaagaagaagaaaaggaacctgaggataaggagatgactttggaggaatatgaaaaggtactggaggaaaaacgaaaagctttactctcccttaagg

SEQ ID NO: 3387 - DNA, 232 bp, Zea mays
  misc_feature: Incyte ID No: 700162169H1
ctggaattattgttaggcctcaacagttggactccactgtgcaaccaaaccatgtgttcgctagccagggcaatgcagcacggaggctgcggctacaggttgagtctagggagatcataactaaagatgagagtgaagatgaagtatcatgtgttctaactccagactgtttgaacgattctgttgaggagtccactgcagagaaggatgtggcttctgatggggatgaggc

SEQ ID NO: 3388 - DNA, 231 bp, Zea mays
  misc_feature: Incyte ID No: 700162170H1
  unsure 176: a, t, c, g, or other
agctgctgctgctgcaatgggaagggcacaccatcttggaagaagggaggggcacaggggacgatctggctctcatggtcgtccacatttcctagttttctctacacaaccaaattcaccttctgctggcacaatctcttcatcttctgctcatatggagggagaaaatgattcanatcctgccacacctagagctagcgagtcatctccacgagctattcgcattggaga

SEQ ID NO: 3389 - DNA, 230 bp, Zea mays
  misc_feature: Incyte ID No: 700162172H1
  unsure 59, 63, 107: a, t, c, g, or other
ggacgggcagcctggcgtcgctgtcggagcatgagctgatcgactgcgacacggacganaacnggtgccatggcgggctgatggagaacgccttcgagttcatcaantccttcggcggcatcaccaccgaggccgcgtacccgtaccgcgcgtccaacggcacctgcgacggcgatcgggcccggcgcgggggaggcgtcgtcgtggtgatcgacggccaccagatggtg

SEQ ID NO: 3390 - DNA, 230 bp, Zea mays
  misc_feature: Incyte ID No: 700162173H1
gcgtgatcgccctgcttacgaacaaaaagttaaagagtactgtgaaaaatacgccaaaccaggggatgctggtgtcaccccagaagagcagtccagtgacgaagagctgagtgaagatgaagacgactcgggtgatgaggagataatgggcaaaccagacccatagtcaagttggcacctactatacctgtaatctgcactcgatgtttattgcagcaactgcaattaaa

SEQ ID NO: 3391 - DNA, 232 bp, Zea mays
  misc_feature: Incyte ID No: 700162174H1
  unsure 176: a, t, c, g, or other
ggagcagaagtaactcacgtcaatctcaacgacaatagttgtgctggccttcagtacgccaagatgaagcttgtgtctctccagtaccatcctgagtcttccccaggtccgcatgattccgacacagccttcggtgagtttatagagctcatgaagagcaacagattgtgagggangggagtactggcaaaggtcaacaattgtcttggtgctctctcgcagcaagctcaaa

SEQ ID NO: 3392 - DNA, 231 bp, Zea mays
  misc_feature: Incyte ID No: 700162175H1
  unsure 217: a, t, c, g, or other
agctgaagctttgcagttacaggaatgggcttcagagcactgttcttctcattaccgtgcccccgaactatgggagtgtccaagtcatgctgacattgatgagaggacagatatatggtctttgggatgcactttgtatgctatgatgtatggaaagtctccatttgattatgagcttgatgagtcttctggtgaaagcttgcacagtgttattaanaatgtacagattaa

SEQ ID NO: 3393 - DNA, 232 bp, Zea mays
  misc_feature: Incyte ID No: 700162176H1
tgagactaaccgtatgcttgagtctcaaaggtggattgaaagggaaaggtgaacttggtccaatgaaagagtaatttattccaagttcatctccatactcttattgcctttttactcttagttgacgatttttgtgaggcaatggggttttagggccaataatgatcccgttttggtgcttaatgccaaagggggagaaattaaaggccaaagcaaatggatcaactaccac

SEQ ID NO: 3394 - DNA, 234 bp, Zea mays
  misc_feature: Incyte ID No: 700162177H1
agttcttccccaacaccaccaccgacatggacctcatcacgcccgcgctgctcgacaacaggtactacgtcggcctcgccaacaacctcggcctcttcacgtccgaccaggctctgctcaccaacgccacgctcaagaagtccgtcgacgccttcgtcaagagcgaaagcgcgtggaagaccaagttcgccaagtccatggtcaagatgggcaatatcgacgtgctcacgggca

SEQ ID NO: 3395 - DNA, 231 bp, Zea mays
  misc_feature: Incyte ID No: 700162178H1
  unsure 2: a, t, c, g, or other
ancaccaccagctcttcgtcctccgatggcccatgcctgaggctggcagaactggtggtggacgacgtcttcacggcgccgtgcgacacctccgtgctgtacccgacggcgggagggaacatgcaccggttcaccgccatggcgccctgcgcgatcctcgacgtcctcgggcccccctactccatagaggaggacagggactgcacgtactacgcggaattaccgtacgca

SEQ ID NO: 3396 - DNA, 234 bp, Zea mays
  misc_feature: Incyte ID No: 700162180H1
agaaatacaacaattaacacatcttcagttgctccggaagattggtctgggagcttcccatgggatctggaggctgacgataccaggttcaatatatttggcatttcctcctaccgatcaaatcaacgagaaataattaatgcagtcatgagtggaagagatgttctggtcataatggcagctggtggagggaagagtctatgttaccagctcccagctgtacttcgtgatgga

SEQ ID NO: 3397 - DNA, 233 bp, Zea mays
  misc_feature: Incyte ID No: 700162181H1
gaaagcagggaaggactcaaaagatttagaaatgcaagggaaggcaggaaaggagtccaaggttgtggaaaagctggatgaccatactttgagcaacaaggaggaatcagacagcgaaactctcagcgtctggaaaaaacgtacagcgaaagcaacatagtcttgctttctcagctgacctttcatattaggatgcagatttcacaggcaggcagtcgttcgcgaatgtggat

SEQ ID NO: 3398 - DNA, 231 bp, Zea mays
  misc_feature: Incyte ID No: 700162182H1
  unsure 57: a, t, c, g, or other
gggcctcacgcaggcgtggatcagcaactgctacatggactacaccagcatcgtcgncgaggaccccgtgctgctccacgtctccggatccttcttcctcggcgacgccaacgtcgtcctcaaggccgtcagcggcgtcgccaggggcgtccaggtcgtcggcaacatcttcagcggcagggacaagggcgtcgacatcgtgcagctggacggcgccttcgccaccgtgga

SEQ ID NO: 3399 - DNA, 230 bp, Zea mays
  misc_feature: Incyte ID No: 700162183H1
  unsure 18: a, t, c, g, or other
cttagaggagcgaacaangaggtcaccgggacgtcattcctggagcttcatgaaggacagctcgtcagaactcgacaagatgtctgcatgcatcgaaagggtcgacacccttgtgcagcttctgaaagccagatatccgaacctgcctccaacttttatagatgttctaaaggtccagtacaatgtggatgtggggaatgcaatcgtggaggcatactctagggttcttg

SEQ ID NO: 3400 - DNA, 227 bp, Zea mays
  misc_feature: Incyte ID No: 700162184H1
ggcgtcgagttcgaccctggatttggcgatgggccccggcgccctcctcccccgcagcgcggtcccgtacgcctccttcgctccaggaaggggaaggagcgcgagggaacgaggagcaggaatctggcgctctccgcttcctcctccaacggtgcagcagtgccatccctgacaacagattcggagaagaagggcccagtgataatggaaattccactggaccaaat

SEQ ID NO: 3401 - DNA, 229 bp, Zea mays
  misc_feature: Incyte ID No: 700162185H1
  unsure 107, 147, 162: a, t, c, g, or other
agcatcatcgatcgccgagcgtgcgtgctctagctctagcaatagcagcgaggagacggtcgaggatggatcagaacaacagcaacaggcagcagcagcaggcgccnccgccaccacccgcgggctacccgacggcaggcgcggagnagcatggaggcagcngcaggaagcagggacgccgggggaagacgacctcgcgcggggagaagggcttcatcgaaggatgcat

SEQ ID NO: 3402 - DNA, 228 bp, Zea mays
  misc_feature: Incyte ID No: 700162193H1
tgtctcaactgtacaagccaataattatccaatcacttgcacgcaatggcatcctgagaaagccatttttgagtggaggaaaccaatgatcccacacagcgaagatgcagtacaggttactcaacattttgccaatcattttatcagccaagcacgcaagtctccaaacaggcctcctgccgacaaagtgctggataacttaatttacaactacagtccgacatttac

SEQ ID NO: 3403 - DNA, 226 bp, Zea mays
  misc_feature: Incyte ID No: 700162194H1
  unsure 10, 12, 72, 75, 97, 157, 169, 171, 194, 196: a, t, c, g, or other
aacgcgtccntngccagcatcgtgacgccggccttcttcgacgcgctcctcgcgcaggccgccgcctcgtgngangccaacggcttctacacccgcnacgccttcctcgccgccgccggctactacccggcgttcggccgcaccggcaccgtcgacnactccaagcgcnanatcgccgccttcttcggcaacgnanccacgagaccataaagttctgctacatcaa

SEQ ID NO: 3404 - DNA, 232 bp, Zea mays
  misc_feature: Incyte ID No: 700162196H1
gccgacccaaatggcatccacctcgccggaacccgccgccgccgacgaaactatcgacaccatccacatccgtcgcctagagtgttccgaccacgagaggggcttcgtcgcccttctctcccagctctccccctgcccggacctcaccacatccgtgttcgccacgcgcttcgccgagctcgcggcgcagggcgacgaccacatcatcctcgtggccgaggacccctccgcc

SEQ ID NO: 3405 - DNA, 271 bp, Zea mays
  misc_feature: Incyte ID No: 700162203H1
gcagaaattgctgctcagttggaacagtacccaaaagcaactgagatatttgaagcgatcgctcgtcagtcaatcaacaacaatcttcttaagtatagtgtcagaggaattcttcttaatgctggcatctgtcaactatgtagaggtgatcctattgccatcacaaattcattggagcgataccaggaaattgacccgactttctctgggacacgtgaatacaagcttttagctgatcttgctgcatctatggatgaaggggatgttgcca

SEQ ID NO: 3406 - DNA, 89 bp, Zea mays
  misc_feature: Incyte ID No: 700162205H1
  unsure 58: a, t, c, g, or other
cgcactacccggcgctcgcgcggctttctttcccaactccgacgaaggctagctacancaccttgtgcgggctcgtctccatcgcccgg

SEQ ID NO: 3407 - DNA, 88 bp, Zea mays
  misc_feature: Incyte ID No: 700162206H1
  unsure 76, 81, 86: a, t, c, g, or other
cgcgggtttggttgacatgaacaagcctcctgaaatgatatctggcaatatgacagcagccatgtgtgtgtattcnggacnctttntg

SEQ ID NO: 3408 - DNA, 268 bp, Zea mays
  misc_feature: Incyte ID No: 700162210H1
  unsure 251: a, t, c, g, or other
ctactgaaagctatgatgactttttggcctctctcccagagaatgactgccgatatgcgctgtatgattttgattttgttactggggagaatgtgcagaaaagcaagattttcttcattgcctggtccccatcgacatcccgcatacgtgctaagatgctgtactccacgtcgaaggaccgcatcaagtacgagcttgacgggttccactacgaaatccaggcgaccgacccatcggaggtggacatcgangttctccgggagcgggt

SEQ ID NO: 3409 - DNA, 268 bp, Zea mays
  misc_feature: Incyte ID No: 700162211H1
  unsure 174, 252, 255: a, t, c, g, or other
attctatttgtggcagtcattccgtagctattcctcttgttctcgtgtttccctacttgtggcgtttcttccaatgtctccgtcagtacaaggatacaaaggagaagacatgtcttttcaatgctctcaagtactcgacagcaattcctgtgattttcctttccgctctcaagnatcatgtatatcctgatcaatgggttggcttctaccgccccctctggcttatctctagtgttgtaaattcactgtatnccntctactgggaata

SEQ ID NO: 3410 - DNA, 269 bp, Zea mays
  misc_feature: Incyte ID No: 700162212H1
gacgaaactaaggagattgatgggaaccgaagcacctaaagagcaggaggcagaagacagttcgccgagtgatttgcctgaagaggttgtcacacctgaagcatcctcagaagaggatatgggagtcgtaatcgaggcttgaccagtgatctgacgtgctggcaagcgagaccagaatttctggagctgttcctgtaaaacaatattttgggtcctgaagtcaccaccgcttggatcgacatgaccctgcggtgttctggtgattccat

SEQ ID NO: 3411 - DNA, 89 bp, Zea mays
  misc_feature: Incyte ID No: 700162213H1
  unsure 37, 42, 44, 49, 52, 57, 60, 73: a, t, c, g, or other
gtgtcttatcgcagtacgagattggatgatattagancagangncaaangtnaagancangaccgagctcctnactccatctgctatgc

SEQ ID NO: 3412 - DNA, 268 bp, Zea mays
  misc_feature: Incyte ID No: 700162217H1
  unsure 17, 35, 65-87, 89, 162-163, 211, 230, 242, 263: a, t, c, g, or other
tttccaacgccttcgcnctaccagccacgtcgttncgaggccgatcgaccgagcagcagcagctnnnnnnnnnnnnnnnnnnnnnnnangtcgtgctgctggacttcttggtgagccccttcgggcagcgctgccggatcgcgctggcggataagggcgttnnctacgagtaccgcgagcaggacctcctggacaatggcgagcttctccnccagtccaaccccatccanaagaagatcccngtcctgctccacggcggcagnccgtg

SEQ ID NO: 3413 - DNA, 99 bp, Zea mays
  misc_feature: Incyte ID No: 700162218H1
  unsure 11, 15, 30, 49, 61, 65, 76, 92, 96-98: a, t, c, g, or other
atggataaganagtnatgtaattatctggngatgtgtaattatgtggcnatattatttgcnacantgatgcatggngtactttcatgtatancacnnna

SEQ ID NO: 3414 - DNA, 83 bp, Zea mays
  misc_feature: Incyte ID No: 700162221H1
  unsure 2, 28, 49, 63, 76, 79-80: a, t, c, g, or other
gnctcctccttcggcggcggctttggcnctgctggctccgacgtccgcnctggtaactggtanttgctcctgcggntcnnacg

SEQ ID NO: 3415 - DNA, 83 bp, Zea mays
  misc_feature: Incyte ID No: 700162222H1
  unsure 69-70: a, t, c, g, or other
cacaataaaaaatgcacttgaagaaggtcggaccattgtagagaataaaacggctgacattattcaggnnacgcgtagtactg

SEQ ID NO: 3416 - DNA, 87 bp, Zea mays
  misc_feature: Incyte ID No: 700162223H1
  unsure 12, 47, 58, 65, 70, 73: a, t, c, g, or other
cacgatcttccngtccgagtctgagctcatctccacgcgccgccgcngccgctcgacngcccagncgcgnagncatgtgcggtaata

SEQ ID NO: 3417 - DNA, 175 bp, Zea mays
  misc_feature: Incyte ID No: 700162224H1
  unsure 100, 112, 117: a, t, c, g, or other
ccaagctgcagagaaccgtgaacaagatgctgcagctggtaacgagaatccacaagaggcagaggtagaaggcaatcggcgtaattggctggaaggtgtnttgaaagagatncagcnggttgttgtagggtttgttgcatcgcttcttcctggttttcagcacaatgactaggcc

SEQ ID NO: 3418 - DNA, 262 bp, Zea mays
  misc_feature: Incyte ID No: 700162228H1
  unsure 132: a, t, c, g, or other
ctcgaaccctcgtgattcctgctcgtcgaccgacaatggcggactccggcctcatcgacgtccagaagctgctcaccgacgtcgtcgacaagctgacatcgctcgagaccaagatgacgacggtcgagcgcnagtctgcaccgtcaagctcgatcaacggcgcctccacgatgccgtcgaggctgggaagcaggccgcgttccccggagtactcgagctgcgtttaccggagtacgacggcacggacgaccccgccatatgg

SEQ ID NO: 3419 - DNA, 263 bp, Zea mays
  misc_feature: Incyte ID No: 700162229H1
tgtactcagagatgatggccaatcacgttattcctgatgataaaactttcacagcactaacccacggtctttgccgaagtggagatattgatggtgctaagaggttattggatgatatgagaagattagatgtgtctccaaatattgttacttataacatgctgataaatgcatgcgtccgtgatggtaagctgcaagaggcattccaactgcatgatgagatgctcagcagtggagtcgtgcctgatgatactacatatgac

SEQ ID NO: 3420 - DNA, 265 bp, Zea mays
  misc_feature: Incyte ID No: 700162230H1
acacagttacacaggcagccagcccattgatcgatcgacacatttctcaggcccttgctcatcagttcggagatcgagtggaaaccttgtcgagaatggttccagatacagttcgtgtagcagtaggaatcctaggaaatgctgcttccatgctcctctacacaacccctatactgacgttcagatgggtgataaggaagggcaacgtggaggaattctcctgcgtgccatacatcctagcgctgctcaactgcctgctgtacac

SEQ ID NO: 3421 - DNA, 170 bp, Zea mays
  misc_feature: Incyte ID No: 700162231H1
  unsure 135, 139-140, 142, 148, 152, 154, 157-159, 161-162, 164, 167: a, t, c, g, or other
gattttgataaaagagcatggtggatataagccgagcagctgataattattttagaacagttatggtggtaaatgaaaatggagccatgaggagctagttttttttttttacctgaactcctagtgtaaaatganaaannanaaaaanaaananaannnannanaanata

SEQ ID NO: 3422 - DNA, 52 bp, Zea mays
  misc_feature: Incyte ID No: 700162233H1
ggtttatagagacggcgctggtgtttcatatctcctaatttcctgtcactcg

SEQ ID NO: 3423 - DNA, 259 bp, Zea mays
  misc_feature: Incyte ID No: 700162234H1
ctcggtgaccgtcgtggcggtgctgttcgcgacggtggcgttcgcggcgatcttcacggtgcccggcggcaacgccaacgacggcgtggcggtggccgtgcacgcgacggccttcaaggtgttcttcatcttcaacgccgtcgcgctgttcacgtcgctggcggtggtggtggtccagataacgctggtccggggcgagaccaaggcggagcggcgggtggtggagatcatcaacaagctcatgtggctggcgtcggtg

SEQ ID NO: 3424 - DNA, 76 bp, Zea mays
  misc_feature: Incyte ID No: 700162237H1
ggaagtaaccgcattgagatcagtgttccggttggtgcacaagttgtctactcgaaatatgcaggcacagaattgg

SEQ ID NO: 3425 - DNA, 101 bp, Zea mays
  misc_feature: Incyte ID No: 700162238H1
  unsure 96: a, t, c, g, or other
gctggttgatccgcggaatggggtgggcaattttctccgccggaggttgattctcccgccgcaaaaaaccaaaacctcgacgtggtcagatcttcnaccag

SEQ ID NO: 3426 - DNA, 253 bp, Zea mays
  misc_feature: Incyte ID No: 700162239H1
  unsure 86, 91, 132: a, t, c, g, or other
agtgctcctccttcatcgacaccttcttcgaggagccctacggctcgtcggagacctcctcctcggacgaagacgaagcagagganaaggnggaggagaccaagctggtggagcaactataactggtttcanccacatccaatccacccattcgcctcgtcctttgaaattctctccattggattggatcttataccatgtgggaagagcggacagtgatgctgcattcagtcatcgctgattcctctcttat

SEQ ID NO: 3427 - DNA, 257 bp, Zea mays
  misc_feature: Incyte ID No: 700162240H1
  unsure 243, 248: a, t, c, g, or other
atcatcggtctatccctccgtgtcaaccccctcctcagaagttctaattgcagttcagcccctggccggtccgccgggccaccggaaggagccgctcgccggaggaagccccccatctccttgccctgcggcgggtttatggggttctcgctgtaccccatgaagacgtccacgcggttgctctggagcactagcttcttccgccataagctcagctcctcctcctgcttcctctgagcccgncccanccgcgtcga

SEQ ID NO: 3428 - DNA, 258 bp, Zea mays
  misc_feature: Incyte ID No: 700162243H1
acgtccctgtgaaaccagcgccttctggattcatcctcctccgagaccttcagcccactgaggccgaggaccttgcactgaccgatgctcccacagcagttggaggaagcaccggcaacactgccacagctgcaagccaacaggggtccggatcatctgccatggccgttgacgacgagccacaaccgccgcaaccctttgagtactcctcataagcgtagatacctgggtccgtagagagttggtggtctgaacttg

SEQ ID NO: 3429 - DNA, 259 bp, Zea mays
  misc_feature: Incyte ID No: 700162245H1
cttttcttggaaattggtaggttgaacatggctgcaagatacagcaaggacattggtgagatatatcagcaagaacaagatttagagaaggctacagattacctggaaagggcagctgacctttttgacagtgagggacagtcgtctcaatcaaacaccatcaaacagaaagttgcagaaattgctgctcagttggaacagtacccaaaagcaactgagatatttgaagcgatcgctcgtcagtcaatcaacaacaatc

SEQ ID NO: 3430 - DNA, 259 bp, Zea mays
  misc_feature: Incyte ID No: 700162246H1
ctcatagtagagaatgacctccctcagaagctacagaacctcattgaagagcgcagggatggacaacggggcggccaacaagtgttggtcaaacaaatggccacctcattgctgaaaggctgcacatcaatacagtattgtgatattggtggatcatatgttttcctctcaagttgtatatgcttgccctagaggagaaggtgccttttccttttgctctgctgtggtggtttctcatgagcaccagactcatctgttg

SEQ ID NO: 3431 - DNA, 262 bp, Zea mays
  misc_feature: Incyte ID No: 700162247H1
ggatgaggggcgggtcgtcacggcggcgctggaggagtacgcggcggcgaagcggtggcgcacaatccagctcatcaccgccgcctacgtcgtcggcttcatccagcagagcaacaacgccgtggtcaggttcgtcagggacaggttcctgtctcggctgctgtccaagacgctggtcgccatggcggactacgactgtggggcgctatgatctgccggctgccgcccctggactggtctgcaagcaatctacgcagcacac

SEQ ID NO: 3432 - DNA, 261 bp, Zea mays
  misc_feature: Incyte ID No: 700162248H1
  unsure 180, 233, 237, 251: a, t, c, g, or other
ctgcgccaggtggtacaggttcaagggggccagcaactgatccgccgaggtaaccgtcgtctcacgatcacgacgagtgcgggcatgaatgggactcagctctatgcggtcctgatggcagtttgcttggtggcttgggtaattatgttatggccttggcagagcaacaggaaaaaaaangggccttaaaataaggtcatgataattattttgtatctaccatagtagttgtntganatcgacgcctctcnccctcccctc

SEQ ID NO: 3433 - DNA, 242 bp, Zea mays
  misc_feature: Incyte ID No: 700162250H1
  unsure 9, 11, 18, 32, 34, 37, 39, 49, 54, 74, 76, 83, 97-98, 119, 123, 159,178, 183, 187, 207, 210, 212-213: a, t, c, g, or other
cgcggccancngcagccngccgctgatgcagnanctncncgccgtgctngtggnccacgccctcagcagcggcnangcggatnggagccctccgggnnctccaagatcaccaggttcgnggantagctccgcgcggtgctgccccaggaggtggaggcngcccgcgtggcgtcgccgntggcnccgnccccgtggcgatccggatcncgnanngccggtctttcccgctgtaccgttcgtgc

SEQ ID NO: 3434 - DNA, 242 bp, Zea mays
  misc_feature: Incyte ID No: 700162252H1
  unsure 71, 239: a, t, c, g, or other
ccttttttgcgaacctgtctattgttgggatgaatgtaagcttgatgtggaactctgttggattctatcanatcgcaaagctgtgtatcattccagtcttatgcattctggaaatcatgttcgacaaagtccgttactctagagatacaaagctcagtatagtgcttgtccttgtaggtgttgctgtatgcacagtcactgatgttagtgtgaactctcaagggttactagctgcagcnata

SEQ ID NO: 3435 - DNA, 245 bp, Zea mays
  misc_feature: Incyte ID No: 700162253H1
  unsure 7, 14, 193: a, t, c, g, or other
ttttgantcatganggactccagcaggttgatgcttctgaccagcctccatcacaatccccagggcatttggacaggggcagaaagcctgtcagaataaacattgcagatattgtttcagtgtcagcatgtgctgatttaaccttaccaagtggcgctggcctctgtatagaaactatttctggtcctacatncttggttgccgatagtttggaggctctcgaaagttggctagacgccatacgt

SEQ ID NO: 3436 - DNA, 243 bp, Zea mays
  misc_feature: Incyte ID No: 700162254H1
cagtgattgatctttctgggacagtaggtgctcaaggagttgcatttggtgcagaagctgggtatgacactgctacgggaaaatttaccaagtacactgctgcaattggtgtaaccaagccagactaccatgctgcattcattctggcggacaaaggtgacaccattaaagtgtcaggtgtttatcacctggatgagaaacagaaggcctcagctgtggctgagctaacccggaggctttcaa

SEQ ID NO: 3437 - DNA, 244 bp, Zea mays
  misc_feature: Incyte ID No: 700162255H1
  unsure 23, 48, 55, 125, 150: a, t, c, g, or other
ggaagggcaagacggcggagganctcctagcggacgccgccttctggnccgcgcnggtcgcggcccccgtcgagaagctgttccgcgtcgtggtcatcaaggagatcaagggctcgcagtacggngtgcagcttgagagctccgtccgcnaccgcctcgccgccgccgacctctacgaggacgacgaagaggatgcgctcgagaaggtcgccgacttcttccagtccaagtacttcaagccggg

SEQ ID NO: 3438 - DNA, 241 bp, Zea mays
  misc_feature: Incyte ID No: 700162261H1
  unsure 4-6, 13, 23-24, 29, 38: a, t, c, g, or other
aggnnnggaggtnggtggttgannggggntggaaatcntcaaaattagataaaacaagcaacatcccacaaagcagtgattgtcttggtgccgagaatctaatcaaattgcttaagaattattccagaagccatgagctcaaactggcaattacggtgggtattgttggacttcctaatgttggcaagagcagtctgatcaacagcctgaagaggtcccgagtggtcaatgtcggttctac

SEQ ID NO: 3439 - DNA, 240 bp, Zea mays
  misc_feature: Incyte ID No: 700162262H1
ccagcattgcagtaagcttctctgtgtatgaaactttacgttcccattggcaaatagagaggccatgtgattcccctgttctgatcagtttggcttgtggaagtctttcaggaattgcatcgtctacttttacattcccattggatcttgtgagacgtcgcatgcaattggaaggagcagccgggagggctcgcgtctaccagacaggactttttggaaccttcggacatattgtccgta

SEQ ID NO: 3440 - DNA, 139 bp, Zea mays
  misc_feature: Incyte ID No: 700162265H1
tgcggttctggtgttgctgcagttcgcaagttgtttgtgtgggcggaaaaatgctagatactgtagaactgcagtgcggtatgctgcacatgctgtgtttgtctgaagaaatgttgtcaatgctggcttgctctggact

SEQ ID NO: 3441 - DNA, 237 bp, Zea mays
  misc_feature: Incyte ID No: 700162266H1
  unsure 26, 54, 174: a, t, c, g, or other
agaccgtctagggcgacggcaagtcngccggcaccgtccgcctcctcaagtacnccgaggcggtgccgatgctgacgttcgccaaggagaagcttgagacggcggacgacgagaacaaggtggtgtcgtacagcgtggtggacggcgagctggcggacttctacaagaacttcnagatcacgctgaaggtgactccggccaaggcggagggcgaaggcggcgccgtcgtcagctggg

SEQ ID NO: 3442 - DNA, 237 bp, Zea mays
  misc_feature: Incyte ID No: 700162270H1
  unsure 16, 124-139, 159: a, t, c, g, or other
ggagaaggaagtgaangagggcacagcgaggaaggtcgacagctgcgcaagggcgatcctgtggcttgctagatccatggatttcacagctgcgctgttacagaggctggaggaggactctacnnnnnnnnnnnnnnnnagcctcgcgcactcgtggangccgcgtacgaggccaccctgaagccgtggcacggctggatctcctcggcggcgtgcaagatagcgtggaagctcatc

SEQ ID NO: 3443 - DNA, 233 bp, Zea mays
  misc_feature: Incyte ID No: 700162276H1
  unsure 3, 6, 9, 17, 28, 32, 38: a, t, c, g, or other
tgnaanccngcccggtnaatcttcctcnttcngccgcnccctcgcctccggcagcgaggtgaggccaccgatcggaccttccctagcggcggcgcctaccaacctcaaggagcgatggctctgtctgcgacgctacggatttctcttagcgtcgcgttctttggggttctggcgttcgtgcttggtgtcatcgccgaaaacaaaaagcctgcttccgggactcctatcctagg

SEQ ID NO: 3444 - DNA, 233 bp, Zea mays
  misc_feature: Incyte ID No: 700162277H1
  unsure 6, 8-9, 17, 20, 181: a, t, c, g, or other
caaacncnncctcatcnctnttctcggcctctaccgccccctcgatcggtcggccggtcagctatgacgccgggaagctcggccgccggatccggcgtcgtcgttcctcggaacttcaggctcctagaagagcttgaacgtggagagaagggcattggagatgggacagtgagctatggantggatgacgcagatgacatctacatgcgatcatggactggcactattattgg

SEQ ID NO: 3445 - DNA, 237 bp, Zea mays
  misc_feature: Incyte ID No: 700162280H1
  unsure 167: a, t, c, g, or other
gcgtgcagttcggccccttcgcgctgccgctcaacggcctgcccatgaccttcgtccgcaaggactgatgagccgccgacagatgtgtggatcgtggacggagccacaccaaaaccacggcaggccgacggaaccaaaccaaagccaacaacaaacaggcggatggntatggtatggcggtatatgctagctagtatactataggagccgcgaaaaccgcttccgggatttggcgtt

SEQ ID NO: 3446 - DNA, 234 bp, Zea mays
  misc_feature: Incyte ID No: 700162281H1
cagcgttgtcaccctcggaggtccgaactgggacgtcaagcttggccggagggactccaggacggcgagcttcagcggcgccaacaacaacatcccgccgcccacgtctggcctcgccaacctcacctccctcttcgccgcgcagggtctctcccagaaagacatggttgcgctctccggagctcacaccatcggccaagcacgctgcaccaacttcagagcgcacgtgtacaa

SEQ ID NO: 3447 - DNA, 231 bp, Zea mays
  misc_feature: Incyte ID No: 700162283H1
  unsure 9, 27: a, t, c, g, or other
ggggccaantggagcattgggtggtancagcgtgcaggggatgcaaggtggttatatgggtggctacggtggttctggtgggtatgggggtgcttcttcaggaggccctggaagacattacatgggtcattaggatgattataactattttactgtggccagaatgccagatgattctacatgttcctgcttggcacttataaacttgctgttttaagctgtttctggcta

SEQ ID NO: 3448 - DNA, 233 bp, Zea mays
  misc_feature: Incyte ID No: 700162284H1
  unsure 2, 10, 16, 26, 37, 41, 54-55, 101, 117, 119, 194, 218: a, t, c, g, or other
anccgttgcntcgctnggttggtagnctatatcctgnacancaccctccaggtnnaggatagcgcggtgcggaaggacaggggcaaccactggtgggagangttcaggagcttcaananagacgcgaggagccaagagttctactcgctgccgttcaatctgaacaagttcttcccgtcggtctgatctcaaanggcgccgccgctgaatcaattctngaagcaacccttgtt

SEQ ID NO: 3449 - DNA, 232 bp, Zea mays
  misc_feature: Incyte ID No: 700162285H1
  unsure 47, 49, 61-62, 64, 69-70, 141, 184, 187-188: a, t, c, g, or other
gtcagtgcaaagcaccaccaatgcctgaataaatttaactacgaggnangtagctagctcnngnccganngccacgtccccacccggctttcttcaggccgtgagacgtggccttcgtccagagctagctacctacctctntcagttcgatcgtcgtcagtgcaaagcaccaccaatgcctgantanntttaactacgaggctagctgctgaacatcgatctgctactgcta

SEQ ID NO: 3450 - DNA, 231 bp, Zea mays
  misc_feature: Incyte ID No: 700162287H1
  unsure 21, 59: a, t, c, g, or other
caagaagggactcggtgcaantgctgaggaggtgaagcagttggctcaaaaagcaaganataatagcctaaaaccagcagattacgagggcggcaccttcactgtatcaaatttgggaggtcccttcggaattaaacaattctgcgccatcataaatcccccccagtcagcaattttggccattggttctgctgagaagagggtgatacctggttccgctgatggtcagtt

SEQ ID NO: 3451 - DNA, 233 bp, Zea mays
  misc_feature: Incyte ID No: 700162288H1
  unsure 2, 4-6, 16-17, 23, 28, 31, 47, 150, 171: a, t, c, g, or other
ancnnngtgcgacagnncaaggncttgngcngggctcgggacgcccntaacgaggctcggggcacggaagccgcggcttgccatggtgttcggtgacctgtatcccagcgcaatgcagcttcagatggtcagcgtcgcttcggttctggnaggccatgggctacgaaattnaggtgcgtccctgaaatgctgtctcgcgaaccataagctagaagtttacttgttggtcgtca

SEQ ID NO: 3452 - DNA, 227 bp, Zea mays
  misc_feature: Incyte ID No: 700162289H1
  unsure 19, 27, 33, 188, 199, 218: a, t, c, g, or other
acttggtgcagacaaggcnttattcanaactcnagagacaaagcattctactcctaagtatggcctcatctaccatgcatccttaattggtaaggcttctcaaaagcacaagggaaaaatctctcgttctcttgctgcaaaaactgctcttgccatccgatatgatgcgcttggcgatggtgaggacnactccattggnatgagagccgacttaagcntgagacacg

SEQ ID NO: 3453 - DNA, 229 bp, Zea mays
  misc_feature: Incyte ID No: 700162293H1
agaacgcgctggagcggtacgacgatgcggcgttctcgcaggtggtgtcgacggcgcgcggcgcaggcctggccgcgttcacgtatctgcgcatgaacaagacgctcttcgacggcgacaactgggggcggttcgtgtccttcgtcagggctatggccgacggtggcgcgaggccagcgctgccgcggtgtgacacggggcactcggacctgtacgtcgggtttgtcga

SEQ ID NO: 3454 - DNA, 230 bp, Zea mays
  misc_feature: Incyte ID No: 700162295H1
  unsure 3, 29, 172, 197: a, t, c, g, or other
atnctcgctaccctgcaggccggcactgnactgcactgcagtctacagaactcgtcagtcacagatcggtgcaggcggtctgcacctgcatcacctaaccaattcctcgattagtctgctgttgcgatttgcgaggcaggtcagctgcaatctttttgcagcagccactaancctgtaccaagtcttcttgcctganggcagaggcaggctccgtcagtcacgccggcgg

SEQ ID NO: 3455 - DNA, 233 bp, Zea mays
  misc_feature: Incyte ID No: 700162296H1
  unsure 140: a, t, c, g, or other
caaattaatctaacaacgaacgacaactccacgcagagcaacaatggcgccgccgatgaaggtgtacgggtgggccgtgtcgccgtggatggcgcgcgcgctggtgtgtctggaggaggccggcgccgactacgagatcntccccatgagcaggtgtggcggcgaccaccgccggccggagcacctcgccaaaaacccgttcggtgaaatcccagttttagaggacggtgata

SEQ ID NO: 3456 - DNA, 276 bp, Zea mays
  misc_feature: Incyte ID No: 700162301H1
gatctgcggcccgacgactacgacgacggggaggtaggggacgaatcgttgcaagcaacgaggtcagaactaaggaggccgatccatcctccagcctccgatcccatccgacgacatggtctgcgtcgcgtgcctgctgccgctcttcctgatcccggtggtcaacgccctcccttacctcatcgacctcatcatcagcaaggtgtatcggctatttggatgggagtaccggagacctgaaagagtcccacctgcatgtccatacaagcctgcagt

SEQ ID NO: 3457 - DNA, 138 bp, Zea mays
  misc_feature: Incyte ID No: 700162302H1
aggaattacaagagctatttggaggaattggccaggtcggaaggatcaagcaaaagcgtggttacaaagatcagtggccttggaacataaaaatctatgctgatgactctggaaaagccaaaggagatgcttgccttg

SEQ ID NO: 3458 - DNA, 137 bp, Zea mays
  misc_feature: Incyte ID No: 700162303H1
agaagatgaacggagagaaggatgatgaagggctttggcaatcgccgctgcaactgcaacccatgccatgccggcttagtgattgggtataatttggcttggcagcagccagcattattatgtgctgatctgttatc

SEQ ID NO: 3459 - DNA, 277 bp, Zea mays
  misc_feature: Incyte ID No: 700162306H1
  unsure 7, 255: a, t, c, g, or other
aacagantcaagactgcatggtggaacggttgctgataattacctctcggcaagatactcccttggatcttcaggtgctcgcgttagccaaccagctccaactgttcccccttttgggctctcaggtgcaagttcacaacgaggctcagtaatggacaggtattcgtatgggctttcgggtccgactggaacacagcgctcagttattgacaggtatgcgccgtccctcgatggaacgaacacaacaagatcgangagctccttgcctgagcagtac

SEQ ID NO: 3460 - DNA, 140 bp, Zea mays
  misc_feature: Incyte ID No: 700162307H1
ctccagcgatgcctctcgggcagctggagagatgcaggtgaatggtgcttcaagtgcatcaccggatgctgtgactgaggttcctgttaatagtgctaccacaagtgatgctggacacagcgagatcgaagaacaaccag

SEQ ID NO: 3461 - DNA, 281 bp, Zea mays
  misc_feature: Incyte ID No: 700162316H1
  unsure 123, 147, 226, 245, 273, 275: a, t, c, g, or other
caagtacccgatgagcatgtgaatgaatttaaatcaatcgagaagtttaagatattcaacactaacaacttgtgggtgaaccttaaagctatcaagagactcgtagaggctgagggcacttangatggaaattattccaaaccccanggaagttgatggtgtgaaagtccttcaactcgaaaccgcagctggtgcagctattcggttcttcgacaaagcgattggnattaatgtcccccgctcanggtttctcccagtgaaggctacatctgntntgttgc

SEQ ID NO: 3462 - DNA, 132 bp, Zea mays
  misc_feature: Incyte ID No: 700162318H1
  unsure 119: a, t, c, g, or other
atttgatgcaggggctggtgtagtacattgccacaaaaactgcctggagtgggctcctgatgtctactttgaagatgactctgtctttaatcttgcaaatgagttggctagaagtaaangaatcaaatgtgc

SEQ ID NO: 3463 - DNA, 132 bp, Zea mays
  misc_feature: Incyte ID No: 700162320H1
  unsure 40-41, 58, 108, 117, 127: a, t, c, g, or other
aaagattcatagtataggttttcgacttcgtcttcatttnnaattctgaattgttgcnttccccacgggtctagagtagtagttagttctattatggtctatatatanttctgtctnttgtacatgntcatt

SEQ ID NO: 3464 - DNA, 133 bp, Zea mays
  misc_feature: Incyte ID No: 700162321H1
  unsure 39, 44-45, 78, 80, 98, 106, 110, 113, 118: a, t, c, g, or other
acttgctctagagctacgtttctggcagccgtgtttgtncttgnnttgacccatgtttagactttgagacctatatcnanggttttggttctcagtgnacaatganaatnacngtganaggcagttgtgttgg

SEQ ID NO: 3465 - DNA, 135 bp, Zea mays
  misc_feature: Incyte ID No: 700162324H1
  unsure 23, 120: a, t, c, g, or other
gatcaacaactagcagaaaatanaaatatgggaacaattgatgaagaatcagatgacgatgaggactatcatgttcctgaagctgatatagaggaaatcactaacaaatctaacaatgangctaagcacacagat

SEQ ID NO: 3466 - DNA, 271 bp, Zea mays
  misc_feature: Incyte ID No: 700162325H1
  unsure 157, 175, 195, 201, 215, 231, 237, 239, 244: a, t, c, g, or other
catatacaagctagacaaagttacatacaacaagtaccatccctacacgtcatggatccctataactgtttatatctgcctgcgcaattgctcccagcagttgaggagtgcctctttggtccttttcgcatggcttggcaagattacactagagacntatatctctcagatccanatttggcttaggtctagcangccaantggacagccaaaanggcttctttgtttcanaccggntnatccnaggcttaacttcaggcttactacgggg

SEQ ID NO: 3467 - DNA, 158 bp, Zea mays
  misc_feature: Incyte ID No: 700162327H1
  unsure 104, 114, 119, 121, 128, 131, 134, 144, 155, 157: a, t, c, g, or other
ctagctcagagatgcagaagttgcattctgaaactacttggttatcgacctgttccctattttagctatctctttatgagagccatttatgagactgaaccatnttgttttgcnttctntncgtggtnacnatntatggtttancattatgattngng

SEQ ID NO: 3468 - DNA, 64 bp, Zea mays
  misc_feature: Incyte ID No: 700162334H1
  unsure 11, 20, 25, 57, 59, 62-63: a, t, c, g, or other
tcgagacttgnctcctttcnagtantccaaatatccacatggtatttcatggtccananaanng

SEQ ID NO: 3469 - DNA, 187 bp, Zea mays
  misc_feature: Incyte ID No: 700162336H1
  unsure 116, 129, 136, 149, 165-166: a, t, c, g, or other
acttgaatactcttcaacagctcagaataaagagtggtcttatagatcatattggaatcgaacctttgatgatggaagctcttgagaagattgagaaggatattaagaaaccactnttaaggagtgacnagaagancatggccaccctnatggcagagtttgacnngattaacgcaaagcttggcat

SEQ ID NO: 3470 - DNA, 164 bp, Zea mays
  misc_feature: Incyte ID No: 700162338H1
  unsure 85, 128-129, 131, 133, 135, 140-144, 147, 153: a, t, c, g, or other
ctcaaacacaaagcgtccaaaagaaatcttcaagtgcaactattcagcgtgataagaaaggaaatgtacaagggccaaaactggntgacggaagcggtgggttccctccattccgctttggcaaaggnngngntngtggnnnnngcnggggangtggcagcaac

SEQ ID NO: 3471 - DNA, 138 bp, Zea mays
  misc_feature: Incyte ID No: 700162339H1
  unsure 96, 98, 110, 115, 123-124, 131-132: a, t, c, g, or other
gcatcatcgacaacaccccggcgccggccatcgccatcgactactggcgcctccccgccgacgccaagctcaaggacgtcgtcaccgtcgtgcgcncngacgagggcacnacggngagtcaannatttcgnntcggaa

SEQ ID NO: 3472 - DNA, 175 bp, Zea mays
  misc_feature: Incyte ID No: 700162340H1
  unsure 73, 84, 95, 101: a, t, c, g, or other
ctgttgcctccgaactcctcctgaataatgtaggcgcagttaaacagcagcagcactgccgatctcttgattnttcaatattgntatctagtggntcaggnccaaataagtaggccaggtgctgactgttgtatggtttgggcctattgtcgttgctaaaaacgagaaatgcgcg

SEQ ID NO: 3473 - DNA, 140 bp, Zea mays
  misc_feature: Incyte ID No: 700162341H1
  unsure 47, 72, 77, 107: a, t, c, g, or other
tgcttactcatgcctcgagtaaattataccacacacccagagagcanttgctaccccctgtgttttgaatanaaganactccagctccgtccatagattctcactcngaactgctgcacgtcgctgtgcaggcgtgtggc

SEQ ID NO: 3474 - DNA, 154 bp, Zea mays
  misc_feature: Incyte ID No: 700162342H1
  unsure 25-26, 36-37, 46, 51, 65, 67, 73, 76, 101, 144, 148-149, 152: a, t, c, g, or other
gtgaaacttgcgagtctttgatgannaatgtctaanncgttgctgnctctncctgagtgcctgcngnagtgcngcncatcgccttgttcgttgccgttgcngtcgtgccccacggccacgcgccccacttcccggtggtcctgngtgnntgntg

SEQ ID NO: 3475 - DNA, 264 bp, Zea mays
  misc_feature: Incyte ID No: 700162345H1
  unsure 250, 260: a, t, c, g, or other
gaccgaagaccgagccgtgcgggggctcgggacgggaacgggacaggaccccaaaatctcagatccttcctgcccgcccgcccgtgcccgtcgacgcgtcgttcttgccggccgcgcctcacctccgccctctcctcctccagggggatcggatacgccacaggctgcgcgatggtgctgtgggtcttcggctacggctccctcatctggaaccccggcttcgacttcgacgacaaaatcctcggttcancaagggctanaagg

SEQ ID NO: 3476 - DNA, 86 bp, Zea mays
  misc_feature: Incyte ID No: 700162346H1
ggaggatcgtcggacactcggaccattgtaacaaggcttgcataccatttggaagattttaccatactgaattggcgacacgcatc

SEQ ID NO: 3477 - DNA, 266 bp, Zea mays
  misc_feature: Incyte ID No: 700162347H1
  unsure 12, 184: a, t, c, g, or other
ctcagagttctnagtttcaacatccattgatggatctgcaagaatatggaagatagatgagggcgcaccactggtcaatttgactcgatcctcggatgagaagatcgagtgctgccgcttttctagggatggcatgaaaccgttcctgttttgcactgttgcaaaaggtcccaaagttgttacngttgtctggaacataagcgattgggagagaattgggtacaaaagacttctggggaagcctatctccacactctcagttactt

SEQ ID NO: 3478 - DNA, 245 bp, Zea mays
  misc_feature: Incyte ID No: 700162355H1
acaggaggcatgtcaagggatttgattgataggatcccaaagacgaggttcagtgctgcgagcaactgtgatcaggaaactgatagcagctgctgcccagtctgcctccaggatttcggagcacggcaattcgtgagggccctgcctcagtgccaacacatattccacgtgcggtgcatcgacagttggctcctccggcacgcgtcctgcccgctatgccgggcaggtgttcacatagaccatat

SEQ ID NO: 3479 - DNA, 244 bp, Zea mays
  misc_feature: Incyte ID No: 700162359H1
gtcaatctggcttcctcctctatacctcatctatgccgataaccccagtgactctggcaaggtccacagcactgttagacaaagatggctgtcaggtgatgattttataacatcacgtatgaaggaagtagcgcactaggcgctcgatggccacaaggctttgctgcagaaggattatactgagctagcgagatttatgaataagaattttgatctgcgaaggagatgtttggagatgatgtac

SEQ ID NO: 3480 - DNA, 75 bp, Zea mays
  misc_feature: Incyte ID No: 700162360H1
  unsure 46: a, t, c, g, or other
aaaacatactgtatcctgtgtatagtcacctcttctttgcactganaatttgaaatgggaatggaagtgttttcc

SEQ ID NO: 3481 - DNA, 96 bp, Zea mays
  misc_feature: Incyte ID No: 700162361H1
ggggactgggtttggtagagacacaggaagggaagagggttcaggggaaaaaaaatcaggtgtagcttttgtaactgcaaaatgattgcagcaggt

SEQ ID NO: 3482 - DNA, 244 bp, Zea mays
  misc_feature: Incyte ID No: 700162362H1
  unsure 181: a, t, c, g, or other
ttaaggtaataccctaaaatcatgttttaggtaaattagaaaaagtttatctcaagattaaaatgcgatgaaacaaatgactaaatgaaaagagctctaaagagttaaagtaatcctttcatttaaaacttatactttggaagattctttgaatgaatttcaccaaagtgtgggccactanaggtttcatgatcatttatgagtatgtaataaccattaatttgataaaattattacttatttt

SEQ ID NO: 3483 - DNA, 243 bp, Zea mays
  misc_feature: Incyte ID No: 700162363H1
  unsure 45, 69: a, t, c, g, or other
acaccgtctggatggactggatgtttggtacgctccgtgagccanatgatatcctcaagaaggcctganttcgtcgtagctgtggttttcctacggtgctggatgtgcttggtctgttctgtccccagtgcctctaatccgctgagcctgttcagcgctctgtttctgtaggctttggtgtgctatttagtttgctaggttttatatgttgtgcttattctgtaatttagtgatgtttgtctg

SEQ ID NO: 3484 - DNA, 247 bp, Zea mays
  misc_feature: Incyte ID No: 700162364H1
  unsure 8, 63: a, t, c, g, or other
gggacganggaggggaaaagagagatggtggaggcatcgccggtagtccggcaccgcggcgancggaggtgcctctagtacggcggcggtgcggaaggggaagtcatgcaagggctgcctctactactcgtcagtgctcaagtcccgcggttacaacccaatctgcgttgggatcccccgctccatcccccaagttcctaactacgtggtggatgaacctaaggaggaggcgacggcgcagggcatg

SEQ ID NO: 3485 - DNA, 240 bp, Zea mays
  misc_feature: Incyte ID No: 700162365H1
gaagaatagttatttgtcctagtaaataataatattcttttttttatttcttgaaattttttgttcgcaaagtcggagatggtgtggtcttcaggaaacatttgctcacaaattggtagctgaaagaagctgtcgagtattggtaaacagcctcgttaccttggaggtcctaactagtattcttttgattagttcagatgaggtgaaaattcatatggtcgaccgtgagagtcgatagta

SEQ ID NO: 3486 - DNA, 241 bp, Zea mays
  misc_feature: Incyte ID No: 700162366H1
gtcctaactacctccacccccgcacgcacaactggccgcgccaaggcaaagctagaagaagacaacgcaaagggagaggacagaggaggagcagaggacgatgggcagcggcggcgctaacactgcccccctcctcaccccctacaagatgggaaaattcgatgtttcccacagggtagttctcgcaccactgacgagacagcggtcctacggcaatgttcctcagcctcatgccatactg

SEQ ID NO: 3487 - DNA, 237 bp, Zea mays
  misc_feature: Incyte ID No: 700162367H1
ctcctgttcaccccgcgtcgtcttcgctctcacgatccctcggcagtcggcgacggctgggcgaccgccacttccgccttctcttcctactgagcgtctccaggcacgcttctgaattcggagttgccagcattcgctcgaggtgccggaccagatctcaccatcatgcaggctagcgatagattcaacataaactctcagcttgagcatcttcaagccaaatatgttggtacaggg

SEQ ID NO: 3488 - DNA, 239 bp, Zea mays
  misc_feature: Incyte ID No: 700162375H1
  unsure 5, 13, 19, 39, 48, 73, 110, 135, 192, 219: a, t, c, g, or other
tgcanggcaagcncgagancgccgccttcttcgcgcacnccacgcacnagaccgggcatttctgctacatcancgagatcaacaagatcaacgcctactgtcgacccgancaagaggcagtggccgtgcgccgcngggcagaagtactacgggcgcggcccgctgcagatctcgtggaactacaactacggncccgcggggagggccatcggttctacnggctctgggaccccggcagg

SEQ ID NO: 3489 - DNA, 84 bp, Zea mays
  misc_feature: Incyte ID No: 700162376H1
cgtctgcattattattatgcacggccatcgtacgtgtatggcttgtatgggttattgccaacttaataaaagcacactctgttt

SEQ ID NO: 3490 - DNA, 240 bp, Zea mays
  misc_feature: Incyte ID No: 700162377H1
gctgaggctattacggttgcaaaattggatattagagtgggacttatcagaaaagcagagaagcatccagatgctgattccctttacgtggaggagattgatgttggagaggacacaccaagaacagtggtcagtggcctcgtcaagttcatacctctcgaagaaatgcagaaccggaaagtttgcgtactctgcaatctgaaacctgtggcaatgcgtggtataaaatcacatgcaatg

SEQ ID NO: 3491 - DNA, 240 bp, Zea mays
  misc_feature: Incyte ID No: 700162378H1
gaatgagcaaacagtggggaaagcagcatgcaacaggcagacaagagcgaagaaaaaagacgtgcaagctaattgattcctgcattgctgaatcatggtttcctgttggctaatagtctacaaagatcaaggttggcagaaaagcgtccatgaaataatttagctgattatataaattaaatgttagcaaggaaaatagtgttaatgcctctggaaataaacttataacaaaaaatgtag

SEQ ID NO: 3492 - DNA, 238 bp, Zea mays
  misc_feature: Incyte ID No: 700162379H1
ggtggcgacttgggtgggcgtggtggttcctccttcggcggtggctttggtgctggctctgatgtccgccctggtgactggtactgctcctgcggcgcacacaacttcgccagccgctccaactgcttcaggtgctctgcctacaaggaggaggctgccggcgcctttgatagtgacatgtcacgctcacggggctacgccggcttcggcagcggcgctgcgcccgtaccaaccgccc

SEQ ID NO: 3493 - DNA, 238 bp, Zea mays
  misc_feature: Incyte ID No: 700162380H1
  unsure 3, 7, 220, 228: a, t, c, g, or other
gtnagangaccaaggcgttcgtagtctcgctcccccgtccatccttccttggcctctccatcgtcgtcagctccccttgtccatgttatttttaacttgttatttttactctattaaatagaccagataggcatgcatataggacttttaactctttcggtagaaacagaatattaggtagttagaaccaatggagtagtgtgtaagggatttacagtanatattaanctgggtttcc

SEQ ID NO: 3494 - DNA, 236 bp, Zea mays
  misc_feature: Incyte ID No: 700162381H1
  unsure 59, 63, 68, 114: a, t, c, g, or other
cttaccaccaaagaaatctgcaaagtggtcaaatggatgaacaagagccagcaaattcnatcnggtcnagcagttaccatgtgtgatttggtaacttttaccaggatgattgcnggagtttctggggacagactattggattaagtggcacgacctgatctattgagcttagcccatacctgcagcacttagtggtaaattcctttgagaatggtagcctttcaagcatgacaatg

SEQ ID NO: 3495 - DNA, 234 bp, Zea mays
  misc_feature: Incyte ID No: 700162384H1
  unsure 217: a, t, c, g, or other
ggttctgttatggattcgttgaattcgaggattctacttctgtccagagtgctatagaggcttcccctgtagcaattggcggtcgtcaatgttacgttgaggaaaagagagcacctggttcacgaggctccagcagaggcggcaggttcgcaccaggcaggggcaacagtttcagaagtgaaggtaccagagggcgtggtaactacggtggaggaangggctacgggaggggtg

SEQ ID NO: 3496 - DNA, 71 bp, Zea mays
  misc_feature: Incyte ID No: 700162385H1
ggtcgatgcggcggtgaaggccggcaggacgattcatcgactgggacggcatggccaagttgctccgttca

SEQ ID NO: 3497 - DNA, 69 bp, Zea mays
  misc_feature: Incyte ID No: 700162388H1
taatctgtcacttgatgtttgtatttttacttaggtttcttaccaacaacattgcagttttgttaaacg

SEQ ID NO: 3498 - DNA, 216 bp, Zea mays
  misc_feature: Incyte ID No: 700162389H1
  unsure 139, 156, 183, 193: a, t, c, g, or other
aagctgtacaagcagacgttctcgtccagccccgacgagcacttgaagaagacgttcgcatgctacctctccacggccacggggcccgtcgccggcacgctgtacctgaccaacctgaacgtcgccttctgcagcgacngcccgctctccttcgcngcgccgtctggccagaccgcctggagntactacaagnttatgatcccccttggcaagatg

SEQ ID NO: 3499 - DNA, 69 bp, Zea mays
  misc_feature: Incyte ID No: 700162390H1
  unsure 44, 62: a, t, c, g, or other
gcgccacgtgcgctccgtcatgggcgacgttccgcgcgctccgnagcatggacgacgacgangtcttcg

SEQ ID NO: 3500 - DNA, 233 bp, Zea mays
  misc_feature: Incyte ID No: 700162391H1
  unsure 145: a, t, c, g, or other
agcaaaaatacctattgctgctgcagtcctccataacttaattcggtcacataatggtgatgagagatggctagaaaatgatcaaggaaatatcaacccgcaaagttttgtcagcctacccaatagtgaccatggaaatgatgangggaatatggaagggaataacttaagagatatgatagcttatcatatgtgggcagattatgagcaacgtagaaatcagtgaatcattt

SEQ ID NO: 3501 - DNA, 233 bp, Zea mays
  misc_feature: Incyte ID No: 700162392H1
  unsure 64, 89-111, 122, 135: a, t, c, g, or other
agcatcatcgatcgccgagcgtgcgtgctctagctctagcaatagcagcgaggagacggtcgangatggatcagaacaacagcaacagnnnnnnnnnnnnnnnnnnnnnnncaccacccgcnggctacccgacgncaggcgcggacatcagggaggcagcggcaggaagcatggacgccgggggaagacgacctcgcgcggggagaagggcttcatcgaaggatgcatcgggc

SEQ ID NO: 3502 - DNA, 153 bp, Zea mays
  misc_feature: Incyte ID No: 700162393H1
attaccattaccatttacgttacatttcgtgaaccaaacggtaccttaactgtaaaccattacatagtaggctgtgcacatatatttgtgttgaaatctacagtgcaactccatatggagtcatgagttgactcttgcatagtacattccttg

SEQ ID NO: 3503 - DNA, 235 bp, Zea mays
  misc_feature: Incyte ID No: 700162394H1
caaatagtcaccagggtcaagctccacccgtccaagacaccatgcctgcagcgcctcatgcgcgtgctcaccctcaccggcgtcttcggcgcgcaggagccgcacgatgacgacggcggctgtgacgacgagctcgtctacacgctcacgccggcgtcccgtctcctcgtcggctcaccggggcagaacgtgggccctttcctgaccctgatgctcggccccatcttcgtgtcgt

SEQ ID NO: 3504 - DNA, 234 bp, Zea mays
  misc_feature: Incyte ID No: 700162395H1
  unsure 209, 211, 215: a, t, c, g, or other
acagcttctacttcggcgactacggccacatctcggtgcagggcccgtacctcacctacgaggagtcgtacctggcggtcaccggcggctccggcgtcttcgagggcgtatacggccaggtcaagctcaaccagatcgtcttccccttcaagatcttctacaccttctacctccggggaatcccggacctgccaagggacctgctctgnangccngtcccgccgtcgcccaccg

SEQ ID NO: 3505 - DNA, 187 bp, Zea mays
  misc_feature: Incyte ID No: 700162403H1
  unsure 16, 23, 27, 42, 54, 69, 76, 96, 112, 126, 134-135, 139, 142, 153, 155,159, 169-170, 178-179, 186: a, t, c, g, or other
gcaggtcccgcctgcngtgcgcngacnacgtgccgatcctcngctacctccagntgcgtcctcaacganacgctcnggctgtacccggtggggccnacgctgatcccgcacnagtccacggcggantggaggtnngtgngtnactgttgccgntngganatgcggctgnnaagtggtnngccattna

SEQ ID NO: 3506 - DNA, 266 bp, Zea mays
  misc_feature: Incyte ID No: 700162408H1
  unsure 169: a, t, c, g, or other
cgcaggagctgtacatgttggtgttcgtggcgaggtacctcgacctcttcacggactacgtctcgctctacaactcagtgatgaagatggtgttcatcaccagctcggcggcgattgtgtggtgcatgcgccgccacccgcagtacggaggacttacgacaaggagcangacaccttccgccacgcgtgctcgtcgccgccgcgttcctgctcgcgctgatgttccacgaccggttcaccttccgagagatatgctgggcattttc

SEQ ID NO: 3507 - DNA, 270 bp, Zea mays
  misc_feature: Incyte ID No: 700162412H1
  unsure 22, 65, 213, 231: a, t, c, g, or other
ccgacccatcactctctgctcncgcactctcacctgcccgcgccgtattcgaccgccgccaagangaacaaggagaggctcatgaagatggccggcgccgtccgcaccggcggcaagggcaccatgcgcaggaagaagaaggctgtacacaagacggtcaccacggacgacaagaggctgcagggcactctcaagagagtaggggtcaacacnatccctgcaatcgaggangtgaacatattcaaggacgatctcgtcatccagttcttt

SEQ ID NO: 3508 - DNA, 268 bp, Zea mays
  misc_feature: Incyte ID No: 700162414H1
  unsure 142: a, t, c, g, or other
gggacgagggaggggaaaagagagatggtggaggcatcgccggagtccggcgccgcggcgaccggaggtgcctctagtacggcggcggtgcggaatgggaagtcatgcaagggctgcctctactactcgtcagtgctcaagncccgcggttacaacccaatctgcgttgggatcccccgctccatcccccaagttcctaactacgtggtggatgaacctaaggaggaggcgacggcgcaggggcatgacctcaggcggttcaggtacg

SEQ ID NO: 3509 - DNA, 115 bp, Zea mays
  misc_feature: Incyte ID No: 700162417H1
  unsure 45, 103, 108-109, 111-112: a, t, c, g, or other
ctataagatgatttccttgtggacggaggagactacgttgaatantggattccggtgaagcatttggaatgcgtagagctgtaggctaccactatcacatgcntaacnngnnata

SEQ ID NO: 3510 - DNA, 266 bp, Zea mays
  misc_feature: Incyte ID No: 700162419H1
  unsure 6, 13, 113, 146, 172, 176, 185-186, 195, 215, 246: a, t, c, g, or other
gaaggntcccaantggcatcttcgtcttcaagttccgcacccacttcggatgcggcaagtctaccggattcggtctcatctacgacaacgtctactctgccaagaagttcgancccaagtacaggcttatcaggaacggtcttgcnaccaaggtggagaagtcgcgcaacanatgnaggagaggnntaacatgtngaagaagatccgcggtgtgnagaagacaaaggctggggacgccaagaaganatgagcaaggtttcagtgta

SEQ ID NO: 3511 - DNA, 264 bp, Zea mays
  misc_feature: Incyte ID No: 700162420H1
cacgactagttctgcgaggctaagagcagaaaaaactccacctgcctggctgatttcatcaactccggcggcttggagaagacgaagctgctccagaatccgatatgaagtttggtgctcgcgtgttgacgggttgatttcggtgcgccgatggggcaggcgttccgcaagctgttcgatgccttcctcggcaccagcgagatgagggttgtgatgcttggtctggatgccgccggtaaaaccaccatcttgtacaagctgcaa

SEQ ID NO: 3512 - DNA, 267 bp, Zea mays
  misc_feature: Incyte ID No: 700162421H1
  unsure 28, 111, 212: a, t, c, g, or other
ctaatctttatcgtcaaggatatcagantgtatgatcaagataagagaatagcaagccacattatcaaggtgcatgccagtggtgctgcagcttcatccacaaacacagangggagtgaaggagagaattggctgaaaaggtacattgagtactgccgcgccacatgcaaaccacggctttcagaaaaagcagctgagatgctgcagaacanatatatcgagattagacagaaaatgaggcagcaagctcacgagacagggaggggg

SEQ ID NO: 3513 - DNA, 265 bp, Zea mays
  misc_feature: Incyte ID No: 700162422H1
  unsure 94: a, t, c, g, or other
gtaatcagcgtcatcatgtgggtcccactctatgaccgcatcctggtgccactaggctagaaaattcactggaagggagaagggtttttctganctacagcggatgggaattggattagtcctgtccattctcgcgatggtatctgcagctctagttgagttgaagcgtttagagattgccaggtctgaaggtctcattcatgagaaggctgctgttccaatgagcattctttggcaaataccacaatatgtcttggtgggcgcg

SEQ ID NO: 3514 - DNA, 109 bp, Zea mays
  misc_feature: Incyte ID No: 700162423H1
catcactgtgctttgctttgacttgatctgctgtctctccagggagatggaacaaactactgtttgtaccggcccgttttgttttgcagctatgaaaatcgccgtattg

SEQ ID NO: 3515 - DNA, 262 bp, Zea mays
  misc_feature: Incyte ID No: 700162424H1
  unsure 9, 107, 248: a, t, c, g, or other
ctgatattngaactgagaagttcatggacatcaaatgtaggtatagtggattggtgccgcagtgtgctattatcgtggccacaattagagctcttaaaatgcatggnggggggcctgaagtggtggctggaaagcctctggatcatgcatatgtgagcgaaaatgtggcccttgttgaagctggatgtattaatcttgctaaacatatatcaaacacgaggagttatggagttaatgttgtagttgcnatcaacaaatttgc

SEQ ID NO: 3516 - DNA, 136 bp, Zea mays
  misc_feature: Incyte ID No: 700162431H1
attgaacatttcaaatcttcgtatggtgttaatgaaaaatctgatgtttggattcgtatttatttccaatgatgataatgtatatgtgcattctcgactgttttggaaagaatgaaaaatcctcgtccgtttgcgt

SEQ ID NO: 3517 - DNA, 134 bp, Zea mays
  misc_feature: Incyte ID No: 700162433H1
  unsure 115, 122-125, 130-131: a, t, c, g, or other
gggcgacaggcgagaccccgctgtgcctgcagcctgtcaaggaggaggagggcggcctcgggaatttctcggccgactcgtccatcgtcgtcacagcaatcgacagctgcagcanttcgttnnnnagganncgg

SEQ ID NO: 3518 - DNA, 262 bp, Zea mays
  misc_feature: Incyte ID No: 700162435H1
  unsure 187, 191, 260: a, t, c, g, or other
gtaacaaagaagatcatggaatgggttatgagtgatgctgaacttgttaagtcttttggtatatttgtacggctctccaatgatattgtatcaaccaagcgtgaacaaagagagaagcattgtgtctccactgttcagtgttacatgaagcagcatgaactaacaatggatgaagcatgtgagcagntaanagaacttacagaagattcatggaagttcatgattgaacaaggccttgcactaaaagaatactcgataangg

SEQ ID NO: 3519 - DNA, 260 bp, Zea mays
  misc_feature: Incyte ID No: 700162436H1
  unsure 2, 34, 84, 168, 200, 234: a, t, c, g, or other
cncaatgtctcctgcgattcctgtcctggtaaangatgcacaacgccagcctctcccagttcagacgaaggatgtgcaaacccnaacccaagccccaaaggaatcacttgcagatccaattccagcaatcaggcctgcagtcaagattgatttgcctgctcaaggcangaaggaagcttcagctggtgctaccagcgaancgcatcttctgccactggcaataatggtgctatngaacgtggtacatcatcagacgttct

SEQ ID NO: 3520 - DNA, 259 bp, Zea mays
  misc_feature: Incyte ID No: 700162437H1
  unsure 38: a, t, c, g, or other
caagtgtgttgctcgattcgatcaccattgtggatggntgaataattgcattggggagaaaaatattcggtattttgtggcctttttagtttggcatttccttatatgtctgtacggggctttaatccttggcttcattcttgctggtgaaataaaagagcggaaaattatatacattctgacagtttattatggcatcgataattcattctcgggcttgtttccacatgttgcacagtggttgcttgctgtgcataac

SEQ ID NO: 3521 - DNA, 259 bp, Zea mays
  misc_feature: Incyte ID No: 700162438H1
  unsure 48, 126, 222: a, t, c, g, or other
ctcagatcagggatagctcgagactgtgtatttggtggtatgttcttntctacttggcaattcctacacacagtgatgctcacctggaaggcagttaatatgagccctaaacctagaaatctagangcagcaggacctgtacccccttttgcctctagtgttgctgcaggctttgcaggagcgatagcagctgctgcttcacatacatttgatactgctaanagtcgttcagagtgtactgtggtgcctaagtatatcg

SEQ ID NO: 3522 - DNA, 262 bp, Zea mays
  misc_feature: Incyte ID No: 700162439H1
  unsure 125: a, t, c, g, or other
acgccatgaccgtcgtccaggccgtgaggagcaagaaggaagaggaacctgagaagcagcaacagcccgctgctgccaacgccttcgtgaaggtcagcatggacggcgcgccctacctgcgcaangtggacctgaagacgtacggcagctacaaggacctctccgctgcactcaagaatatgttcggcaccttcaccgcatctgggaacagcatgaacgaggggagattggttgatccggccggcgatgctgatgatgtggg

SEQ ID NO: 3523 - DNA, 262 bp, Zea mays
  misc_feature: Incyte ID No: 700162443H1
  unsure 178, 194, 200, 258, 261: a, t, c, g, or other
gcggattttaacaagccattctgatccatctatgcttcttgtacagacatttggatgctgaggcgtatacgtgaagcggtcagcaaaattaggaaacattggttagcgagttaatgaggcgcaattatttttcagcatttttagtactgtgtttgacagcatttgaatttactttgcnttggttagtgtaccangtcctntttttgttagaacaaaggaagaccttgcgtcgataagctgtggttttatcaagtttgnatng

SEQ ID NO: 3524 - DNA, 260 bp, Zea mays
  misc_feature: Incyte ID No: 700162446H1
  unsure 164, 174: a, t, c, g, or other
agaaaccaagattccattcccctggctagttttcaatgagaaggtgaaagtgaattctgttttcctccgggattcaactgctatatctgattctatactgttgttattcggaggctgcataaaacaagggggcttggatggacacttaaaaatgcttggaggtnatcttgagtncttcatgaatcgcgatcttgcttcaacttatgtgagttgaagagagaacttgagaatttaatccattgcaagctccaaaacccatg

SEQ ID NO: 3525 - DNA, 263 bp, Zea mays
  misc_feature: Incyte ID No: 700162447H1
gcagccgccccaatctgcggttcaagaaccgcccacgcagaacccctccgccctccgctccttctagctcgctctctacctgcaccagcctcgcccacccttcgctcgccgccgccatggggaggggaaagttcaagggaaagcccaccggccgccgcagcttctccacaccagaggagatcgctgctggtacttcaggtcgccctcgcacctttatgaagacatgcaattgaaaaagagaattgatctcttttatgggcgag

SEQ ID NO: 3526 - DNA, 243 bp, Zea mays
  misc_feature: Incyte ID No: 700162448H1
  unsure 4, 15, 241: a, t, c, g, or other
gctnccattaatatnggcagcaagctagctaggatcatcagcatctgagcttattattactaaatcgatcggttgccatggcgatgagagtcggcaagctggcgctggctgcggtgctgctgtgcgcggcggcggccatggccacggcgcacagggcctccggcgtggcgcgccacctacaacttctacaacccgcagcagaacaactgggacctcaacgccgtgagcgcgtactgcgcgncg

SEQ ID NO: 3527 - DNA, 117 bp, Zea mays
  misc_feature: Incyte ID No: 700162449H1
  unsure 54: a, t, c, g, or other
ggaagcttcagctttgcttccaggttgctgtgttgtagttttacgtgaagggcntcaggatataggatccatagctacagatccctcggccattgccattgtttgctggaaaggaaa

SEQ ID NO: 3528 - DNA, 88 bp, Zea mays
  misc_feature: Incyte ID No: 700162450H1
ctagatcatcagtagccagctcaggagccgagcctggtcagggtagccaagcccatcccggtcctctcccgggcgtcttctccctccg

SEQ ID NO: 3529 - DNA, 149 bp, Zea mays
  misc_feature: Incyte ID No: 700162451H1
ggcctggggccatatgatcgccctagcaggggaggaggtcgttttgatgatcgccactgatgaactgcttctagactcgagcccctggtcttgtagtttagctttttgcagttttgcatagcttaatgcttaatgggctatggaagatg

SEQ ID NO: 3530 - DNA, 82 bp, Zea mays
  misc_feature: Incyte ID No: 700162453H1
ctcctctcccgacgacagctacacctcacaaccgtgagctcgcgaaggaacgctgttcgcaattccggcgccggcaccatgt

SEQ ID NO: 3531 - DNA, 113 bp, Zea mays
  misc_feature: Incyte ID No: 700162455H1
  unsure 79, 91, 98: a, t, c, g, or other
aagaagcctcagttttggcatccagcagcaactggccatggaaagcagtgggatcggcagagtggcccccctggaggcngtcctcttcganatcgacngcaccatggccatct

SEQ ID NO: 3532 - DNA, 235 bp, Zea mays
  misc_feature: Incyte ID No: 700162456H1
  unsure 228: a, t, c, g, or other
ggttatcgaagaggtgatggagctccaaggagtccttcttggcgacttctttacgctccacatcaagtaccaggtcgaggacctcgctcccaagcaaagagcaagcaatgtccaggtctccctgggaatcgagtggtcgaagagcaccaggcaccagaagcggatcgagaagaacgtcctttccagttcgtccgcgcgcctaaaggagatgttcagccttgcgtcganggagtct

SEQ ID NO: 3533 - DNA, 235 bp, Zea mays
  misc_feature: Incyte ID No: 700162457H1
  unsure 182, 200: a, t, c, g, or other
agccagtcaaggtcagcaagaagaactcggctgcagtcaccaagttcctcgatgagctggctaagattgacttccctggagccaaggtggtgagcgaggcggtggccaagtccggcacctcgcccctgcttccggcgatcaccttcatcttggacaaggtcgcaccgtttatccccaaggangagcccaaggcggagcgncggcggaggccacctcccgggaagtcgccgtggag

SEQ ID NO: 3534 - DNA, 102 bp, Zea mays
  misc_feature: Incyte ID No: 700162459H1
  unsure 47: a, t, c, g, or other
ctccggatcggatcatggcgacgacgcaagagcgagatgtggcgcancctaacgacggaggaggcgacgtgaagtaactatgtggtggcggagcgcaaagtc

SEQ ID NO: 3535 - DNA, 235 bp, Zea mays
  misc_feature: Incyte ID No: 700162460H1
  unsure 185, 194, 198: a, t, c, g, or other
cattttacagtttgcggtgatgtgcatggccagtactttgatttgctcaacatatttgacctcaatggccttccatcagaagaaaatccttacctcttcaatggcgattttgtggaccgaggatctttctccgttgaagtcatactcaccctttttgctttcaagtgcctctacccaaaagctangtaccttgnaagnggaaatcatgaaagcaagagcatgaacaaaatatatg

SEQ ID NO: 3536 - DNA, 147 bp, Zea mays
  misc_feature: Incyte ID No: 700162461H1
ggagaacctatttccatgtcagtggctgcaaatctgcaaagctgtatgccaatgccagctctgtagatgaaagacatcgccacagatacgaggtgaaccctgatatggtcccagacttcgagagggccgggcttcaattcgtgggca

SEQ ID NO: 3537 - DNA, 239 bp, Zea mays
  misc_feature: Incyte ID No: 700162463H1
  unsure 26, 109: a, t, c, g, or other
caacaaggcagcagcacaagcaaganccacacctcctcccttcgcctgtgatcatgtcgtcttgctgcggcggcaagtgcgggtgcggctccagctgctcctgcggcancggatgcaacggctgcggtatgtaccctgacgtggagaccgccgccaccagcagcgtcaagaccacggtcctcgccgcgccgaccaccaaggccagcgccggcggcttcgaggcggccaccgagggcggc

SEQ ID NO: 3538 - DNA, 241 bp, Zea mays
  misc_feature: Incyte ID No: 700162464H1
  unsure 54: a, t, c, g, or other
agagcgaggggtacctgtgggggaacaggactgcagctgtggactccgacaagnagcagcagcttcttgccgtcattggagtttacactgggtttggctcccgtctcaagaggaacgtcttccgtggctcctggatgccaagaggtgatgctctgaagaagcttgaggaaaagggtgtagctattcgttttgttattggtcggagtgcaaatcgaggtgatagcttggaccgtaatattga

SEQ ID NO: 3539 - DNA, 155 bp, Zea mays
  misc_feature: Incyte ID No: 700162465H1
gagtttgctatccgtgagggtggtaagaccgttggtgccggtgtcatcaacaaaatcattgagtaaactggatataacatatccaccatgagaattttccttgtttactcaaagcgacatgctccgtagttgttattatgtggtgagtttagggg

SEQ ID NO: 3540 - DNA, 79 bp, Zea mays
  misc_feature: Incyte ID No: 700162466H1
cacacacacaaagcgcacttttcaaatcgacaaaggggaaaggttcgcttcttctcgcatcttgctttactttcgagtg

SEQ ID NO: 3541 - DNA, 84 bp, Zea mays
  misc_feature: Incyte ID No: 700162468H1
  unsure 73: a, t, c, g, or other
ctgaagcttatatattactacatcgatcggttgccaaatggcggggatgacagtcggcaataagctgggcgcnggctgcggtgg

SEQ ID NO: 3542 - DNA, 142 bp, Zea mays
  misc_feature: Incyte ID No: 700162470H1
gaggaagactactataaagattgtgaggagttctaggccattgttgcttcgatcaaccaccatgtggatagtcgttagttttctagtttatgttataaagatattcaatttatgtaataaagtttatgatattggtttgcag

SEQ ID NO: 3543 - DNA, 228 bp, Zea mays
  misc_feature: Incyte ID No: 700162471H1
  unsure 196, 203: a, t, c, g, or other
ctacgagaggctgaggtcgaggtactacgaccacggggcgaagggtggcgagagggtggccgtgttccaaccgtcgcacgaggagcgccaggcgacggacaacatggcgcacaaccagagagcgctcgcggatatctacctgctcagcttctccgaggagcttctcacgtcggggaggtccacgttcgggtacgtnagcagcnacctcgccggcgtccggccgacgat

SEQ ID NO: 3544 - DNA, 109 bp, Zea mays
  misc_feature: Incyte ID No: 700162472H1
atggccgatccggcggaggagaacgttgtctcgccgccaccgacccctgcggccccagccgtgggcgcctcagactcgcccctgcagcctgttgctgacggcgcctcaa

SEQ ID NO: 3545 - DNA, 163 bp, Zea mays
  misc_feature: Incyte ID No: 700162473H1
agaatagcacttttcagacactcataaatcctgagaaagatgtgaaaaatacatatgttcatggtattaacaacagtatgctctgcaggcctgatgttccaagatttggagagattattcccattctgctacaatatgtgtggagtcgtcaaatggacggtaa

SEQ ID NO: 3546 - DNA, 229 bp, Zea mays
  misc_feature: Incyte ID No: 700162475H1
  unsure 179, 190, 198: a, t, c, g, or other
gcttcttttatcttcttggaagcgctcccttattcctggtatatttggtctggttgctggttctctctatcgtctaaatgtgctcggcatccgcaagatgaagcttccacaggttatttcatcattttttgcaagatatttcgccccttccccaggaagcacatctcgcccctccaggngtcttgttggnaacacacngtcccatagaggccgtgctgttcagaatcag

SEQ ID NO: 3547 - DNA, 231 bp, Zea mays
  misc_feature: Incyte ID No: 700162477H1
agaaagcgtacaaggagctgaaagaaatcgctcgcagcgaagggaggaagccacctccgaatccatacccgagtgccataaaggaaatacaggcggaggaaaagaagtatgtcatggaccgtttgcataacccgaagtaatcgagattgcgaacaagatgaaggaggagcgagacaggatgttgagggatagagcagcaggtcagcggtagtcgtagcagcaggtattgtt

SEQ ID NO: 3548 - DNA, 159 bp, Zea mays
  misc_feature: Incyte ID No: 700162478H1
ctgtaaactgatttgctccagcgacatgtcttggttttatcactctgtaaactgatttgctccagcgacatgtggttcttacatttgaaaccctcctgagcgcatactgtagacaaatgagatacgtaagatggatgttgtatttgacagtctctgcag

SEQ ID NO: 3549 - DNA, 173 bp, Zea mays
  misc_feature: Incyte ID No: 700162479H1
gatccaggtctcccgccccgcctgagatctcgacctcttcactcctcgccgctactgctcgccctcccgcgtatcctcgtatcagctctcaggttttcagcctgatcaaaccggtgtacccagccgtgcatgactgcattggttcggctcgccggaagagcagcttcgcggag

SEQ ID NO: 3550 - DNA, 184 bp, Zea mays
  misc_feature: Incyte ID No: 700162481H1
ctagttgagattattcagtattgtcggcacaggtggacagtcacattttcagtgattacgcatgtcccaaaattttgactggaatactccatgttacactattattcgtgcagtaggaaagcacgtagcgtaccaaaatatttatacttcaggaaatagacaaagacattggtgatgaaaacgg

SEQ ID NO: 3551 - DNA, 227 bp, Zea mays
  misc_feature: Incyte ID No: 700162482H1
  unsure 84, 121, 142, 182, 199, 214, 217, 223: a, t, c, g, or other
agcaaatctcacgcacagaaacaccaaagccccaaaggcccaaactcaccacctcccaatggagaacggcgacgaaaccctcgnctcccccacggccgccgccgagacggacgcgctcaanggcggcgtcgcggaggatgancaggtccccatcacccaccccgcaaagtcctacgtcacgntcgccgacgacaacccngctcctaaggggggngtngtgaangagg

SEQ ID NO: 3552 - DNA, 80 bp, Zea mays
  misc_feature: Incyte ID No: 700162484H1
caaatctcaagtccatccacggcgctactaccctcgctgcaatggagttgaggaggcctgcatcctctcctcttgtcgag

SEQ ID NO: 3553 - DNA, 81 bp, Zea mays
  misc_feature: Incyte ID No: 700162485H1
ggtttcactatctctgctggttgtcagcatccttagttctatgtcttctcagtctgcatttaaaataggtactggctctgg

SEQ ID NO: 3554 - DNA, 68 bp, Zea mays
  misc_feature: Incyte ID No: 700162486H1
cattccacaggcgaatggctcagcgcgtgttaggttgggggccactgatataatcgctagtgtcaagg

SEQ ID NO: 3555 - DNA, 222 bp, Zea mays
  misc_feature: Incyte ID No: 700162487H1
ggaaaggctccggatctggcagtatggcgatgttgaatcggatgaggacgagcaggccccagctgcaaggaagcctggaggtcgtcggtagagctccccaaatgtgagactctgctgggagttatagatgcaacttagagggtaccttatttattcggttagaaaacagaacttagcgaggcgaaactttctcggtttgagcacttttgatattccgttttt

SEQ ID NO: 3556 - DNA, 222 bp, Zea mays
  misc_feature: Incyte ID No: 700162488H1
  unsure 184, 201: a, t, c, g, or other
catggggtgccaaaccaacgatttctgcgattgtgatgttaaatcctgcgattgtgataaatcgcaggtttctctgaattggactggggctctgcgagccaagataatgtggtccagtgacttaaccaccgattatagtatccctcctgctaatttcatcacttcaatggaagcgacgtttgcnagtgactctagcctgcnaggcagttcttaacttcactg

SEQ ID NO: 3557 - DNA, 225 bp, Zea mays
  misc_feature: Incyte ID No: 700162493H1
  unsure 204, 217: a, t, c, g, or other
tgtgctccttcttggtgttggtgttgcaactagtaactgatctgcaactcaaccttgtgggatctgtattgtccctactggcaatcatcacaacctgcattgctcagatcatgacgaatacaatacagaagaagttcaaggtatcttcgacacagctcctgtaccaatcgtgcccataccaagcattgactttggtcctcgtcnggccaatccttgnttgggttt

SEQ ID NO: 3558 - DNA, 225 bp, Zea mays
  misc_feature: Incyte ID No: 700162494H1
cttgggataatgaaggcatcaagacgttgataaattcattgtccaggcatggcccctctgtcaggcgccaaagttttgaaatagtttaaaatgggacctgacgttgagcaggaacggtcgcccgtctttgtcgattaaggaccgtaccgattgttggcctgatgatctaggaccttttaactggccacatacctcgtcatgggtaagcctgaacccggctattcc

SEQ ID NO: 3559 - DNA, 227 bp, Zea mays
  misc_feature: Incyte ID No: 700162495H1
atttcgccatttacatgccatttttcgcaccagtttccttgcatgtgctgctggcggcaatcaaagagctgaaacgttacaaggcagagcgagcaaaatattcggcatttcttgcttcccaggcgacatcctcctgatctggtgatgattagcacggatttgcaccagaaaattctgaacgtttatatgaagctgatggccactattggtactgcacatagtggaga

SEQ ID NO: 3560 - DNA, 242 bp, Zea mays
  misc_feature: Incyte ID No: 700162501H1
  unsure 31, 122, 145-146, 150, 152, 155, 162, 175, 177-179, 183, 186, 189,197-199, 205, 208, 216, 221, 227, 230, 232-233, 235, 239: a, t, c, g, or other
cccggcgctctcatccggtgaaaataaagangggaaacggacaggagccgcctcaaatggacagcggaaggacttccgacggcgctcccgaggagctcacggctgtgcagggtgttgcgaanacgaagagatcagtaaagtcgannaagncngtnttctcanagtaacacgggangnnnaggnacngangacacgtnnnggcccnacnacccccanccccnaacccngtncnncngccntcc

SEQ ID NO: 3561 - DNA, 103 bp, Zea mays
  misc_feature: Incyte ID No: 700162502H1
  unsure 53, 55, 58, 64, 73, 80-81, 85, 92, 95, 98, 100: a, t, c, g, or other
ggaagcatgatctgtatcgggaagatgatgaaccagcttcaaaatcaacagancnganggattngcgattgangcttcannggcnaagtttncancangnttt

SEQ ID NO: 3562 - DNA, 241 bp, Zea mays
  misc_feature: Incyte ID No: 700162506H1
  unsure 13, 198, 206: a, t, c, g, or other
gcgcgccgcgccncggcgccatcgtccaggcagtcacccactacagcgaccccaccatcctggccgacgtcagcacggggctcggggaggccatggtcggcatcaacctcaacgacccaaaggtggaacgatacgccgccagatccgagtgaaccctttctttccgtagtcgtctccatccatccatctgccttggantgcatttncgtcggtttcatgtctctcaatcagtaataatggg

SEQ ID NO: 3563 - DNA, 234 bp, Zea mays
  misc_feature: Incyte ID No: 700162507H1
agcgtctagcaaagtccgatcctatggttctctgtacaatggaagaatctggtgagcatatcattgctggagctggtgagcttcatcttgagatttgcctgaaggatctgcaggaggacttcatgggtggtgctgaaattattgtttcccctcccgtcgtctccttccgtgaaacgttcttgagaagtcctgccgtactgtcatgagcaagtctcccaacaagcacaaccgtct

SEQ ID NO: 3564 - DNA, 238 bp, Zea mays
  misc_feature: Incyte ID No: 700162513H1
  unsure 91, 115, 130, 137, 186, 205, 211, 214, 217, 225-226, 228: a, t, c, g, or other
ccaagaacaaaaatggccaccgccaccactgaagccgaagtccgtgagtccctcggcacgaagttcggtcgcctcaaggaacaggcgaaanacatggcctccaggcaccccgtcnctggagccgcggccntcatcgntgtcagcgccgtgggcgcctacttcttgtggcccgtggcggccccggcngtggccatgatgaaggcgncttggntcnggngtgttctnntntcccgcgggt

SEQ ID NO: 3565 - DNA, 81 bp, Zea mays
  misc_feature: Incyte ID No: 700162514H1
  unsure 38: a, t, c, g, or other
caggcgggctaccgtcatgctgaccaacccattgccantggttttgtttctttcttaagcgttgacactgccatttctttt

SEQ ID NO: 3566 - DNA, 86 bp, Zea mays
  misc_feature: Incyte ID No: 700162517H1
  unsure 2, 8, 20, 24, 27, 51, 61, 76-78: a, t, c, g, or other
gntgctanaagtacctttancaantancactgcttactcggtgtctctgtntgtgtgctantcgttgcgttcgtannnagcagata

SEQ ID NO: 3567 - DNA, 235 bp, Zea mays
  misc_feature: Incyte ID No: 700162518H1
  unsure 191, 196, 208, 212, 219, 222: a, t, c, g, or other
ctcggaggccgccacgaaggaagcccctgatgcgagggagccagagaagcgccactgactatcttctatggcgggaaggtccttgtgttcgatgacttccctgctgagaaggcgaaagacctgatgcaaatggccagcaagggttcatccgtagcccagaaccctggcctgctgcctccttccacagctgnaaccnttactgacagcnccangatcgcngcnttgccaagccgcg

SEQ ID NO: 3568 - DNA, 171 bp, Zea mays
  misc_feature: Incyte ID No: 700162519H1
  unsure 2, 83, 97, 113, 122, 130, 138-139, 143, 157: a, t, c, g, or other
antaaatatacttaatataaatatgtcattgtaatatatgtaataggattcattgttgaatgacacaagttgtatgcttattnttttacaatttatngtacattattatttgntcattgtanttaaatanggctgggnnaatnagtagggggggccntatgacgtccacct

SEQ ID NO: 3569 - DNA, 230 bp, Zea mays
  misc_feature: Incyte ID No: 700162520H1
  unsure 147, 200, 202, 216, 218, 220-221: a, t, c, g, or other
tgtgaagccacattgtgatttatttgtagaaattggacagcttttatgacttttcttcaaggaaaatgattataaacatgcacctgattggaagctcatctagcagcgaggataactcatacaggggaccctcggcatccagatgcnacgtgctcgaagatgctgaggatgctcagagcgatggccaggtggggaagaantngcctcatccagacntntnngaagcgttg

SEQ ID NO: 3570 - DNA, 190 bp, Zea mays
  misc_feature: Incyte ID No: 700162522H1
agctcaacgatgcataccatatttcatagtgttgcagtaacacatcgatacagataataatagcatataagtcttcagcaacttgccatcagtacaaggaaactagtgggggatcaaaacacaaagacatggctatatctacttctccgaggagttggggccgcgtttcttgccgaatccgacgacgggg

SEQ ID NO: 3571 - DNA, 229 bp, Zea mays
  misc_feature: Incyte ID No: 700162523H1
cttgtatatcaactctttctataccccagtatcaataaggttcttggacctatcaaatcttctcgagttgcagctatcctgtgcataccgatcctctttgcctacccctacatgacgtacctgtcggaacctggattgtcaatcgttttgaatattgcgtcagtgataaagaataatctcggtgtcaccatcattacaggcactttcatccttcaaaacaatgccgtgc

SEQ ID NO: 3572 - DNA, 231 bp, Zea mays
  misc_feature: Incyte ID No: 700162524H1
  unsure 213, 220: a, t, c, g, or other
actgtacctgctagtggcatctcaaaagtaatgggaaaacatggcacaaacttggacaacattagaaagatttctggagctcacattgaaattattgaaccaaaatcctctcgtcatgagcatattgcttacatatctggaacctctgaacagaggcattcggctgagaatttgatcaaagctttcataatgtctacctaagattccttctgnggtctgngaacaccattt

SEQ ID NO: 3573 - DNA, 230 bp, Zea mays
  misc_feature: Incyte ID No: 700162525H1
  unsure 131, 174, 216, 218, 220, 224, 226: a, t, c, g, or other
ctatggagcagcgttggactgctcgcagcaagagcccgatgagcccgagatgaagctctaaagaagatgatgtattttcatgggttggtattataatgtatctgccaacatctgatgctcgccaaaggaangaaatcacagaggagttcttcagttacaggagcctggcgcgangtctctgggatgattattccgcctattaacactggccaattngngngttncncccc

SEQ ID NO: 3574 - DNA, 232 bp, Zea mays
  misc_feature: Incyte ID No: 700162527H1
cttaaggcaaactataaggtgttgaaggaagcccgcaagcaaagtggtgttggatggaatgaggccatgggtatgatcattgcggaaccaccaatatgggcaaatataattatcagtaatccaaaggtcaagaaatttcggtcaaggccattccctttgtataatcagttgtcagcactctatgatggcagttgtgccaccggtaaatcagattgatcagcaagctgagggg

SEQ ID NO: 3575 - DNA, 232 bp, Zea mays
  misc_feature: Incyte ID No: 700162529H1
  unsure 178, 200-201, 207, 214, 221, 227: a, t, c, g, or other
gagacttggctgcgctgcgctgctctgctgctcccgcgcattcccgatgcgtgggcgtgctctgattgggcacggcggtggcagtggcacaccttcgtcttccttttgtttgttttttttccttcctctttctacttgattttcatttaacgaattggtatcgctgatgcaccagttnaatttggtgccctgtgatttgnnctttcncgcgagngggggancaaacntgtag

SEQ ID NO: 3576 - DNA, 240 bp, Zea mays
  misc_feature: Incyte ID No: 700162531H1
  unsure 145, 192, 198-199, 201, 204-205, 227-228, 233, 239: a, t, c, g, or other
tgtcaaatgaaaataatgacaccggaattacaatacgaaggcgcagagcaactgcgcctcccgctaacatttcactagcagctggcaagattaaaatgcaggttggaattaagaggatggttacgagtaattcagaatctatcanccagactatgaagtttacagattacagtgggcgtcgtcttgatctcngggctnntnttnngccccagaaggaaaattccaannatgtnatttcnc

SEQ ID NO: 3577 - DNA, 242 bp, Zea mays
  misc_feature: Incyte ID No: 700162532H1
  unsure 89, 92, 97, 111, 113, 124, 130, 209, 213: a, t, c, g, or other
cttccccatcgcacaagtccagaactgcaatctgcaatcacccacttccagaactgcaatcaagtccagaactccaacttcagagcatncanttccnatcgcctaaacacncnacggctctccnagtcgncatcatcagtgcgctggtcggctggtgaactgggccatctcgtctcgtgacgatcagccccgggccgtaagcccaccgnatcnacagcaggccgcagattcccctgtttcca

SEQ ID NO: 3578 - DNA, 227 bp, Zea mays
  misc_feature: Incyte ID No: 700162535H1
  unsure 153, 197, 209, 218, 223-224: a, t, c, g, or other
ggaggcgtctttgaggaagttattgtgacaaactccatcctgctgccggaagacaaatgcttccctcagctgactgtgctttcgatggcgaatcttgtgggggagacaatttggcatgttcaccgcgatggctccgtcagcagcatcttccantagcagaaacgagcgcgtacatcgtcacctcgccttgcgttcgngtgcttggtatngagaaggcncccanngcc

SEQ ID NO: 3579 - DNA, 223 bp, Zea mays
  misc_feature: Incyte ID No: 700162537H1
  unsure 169, 174, 191, 203-204, 219, 222: a, t, c, g, or other
caatatttcaatgtatgtattttttggaatatctaaacaaagcgaatgacttccaggattcttgcatcagttcattggagaagtatggtgttggttcttgtggtccacgtggcttttatggaacaattggtctgtattatcatcctcagacaatgactttgggttgaangtatnggggagcttaacttccnatggggtcctgnnagggccattggcggnggng

SEQ ID NO: 3580 - DNA, 225 bp, Zea mays
  misc_feature: Incyte ID No: 700162539H1
gcagctaataaggtaataaggggcgacgaaaatggctccaacgaccgctaccaaggacgacagtggctacggcgacgagcgccggcgcgagctgcaggcgttcgacgacacgaagctgggggtgaaaggcctggtggactccggcgtcaagtccatcccgtccatcttccaccacccgccggaagccctgagcgacataatttctccggcgcctctgccgccgtg

SEQ ID NO: 3581 - DNA, 225 bp, Zea mays
  misc_feature: Incyte ID No: 700162541H1
tgggagacagtcccttcacgtcatcttgttggcccgaaagcagccatggcttgtgcagtccttggctgtttgatgtaaaccatagctggggagcttggttggggtcacgtgctgggctgttctatatgcatggtacttgagttaagttatgtttggttcgctacctaacttgccacactttgcctcacttttctgcctaaggttagttcttcaattcgaacgact

SEQ ID NO: 3582 - DNA, 228 bp, Zea mays
  misc_feature: Incyte ID No: 700162543H1
  unsure 93-124, 176, 185, 190, 192-193, 201-202, 204, 210, 216, 227: a, t, c, g, or other
ctgatgatgataatgatgaggagggagacgatgaggatgctgaaaaccaagaagatgatggtggtgatgagggatcagatgacaatgggaatnnnnnnnnnnnnnnnnnnnnnnnnnnnnnnnntcctgcagccaacggtgaaggaggaattgacgacgatgatgatggtggagangattaagangaagntnntgaccacnntnattatngggatngtgacaatgang

SEQ ID NO: 3583 - DNA, 183 bp, Zea mays
  misc_feature: Incyte ID No: 700162544H1
  unsure 161, 182: a, t, c, g, or other
ggtatgaccgtggagaggatgtggaggagatgaatatgggaggcgggggtggcttcaatccttttgggggaggcggccagcagtacacgtttcaatacgacggtggcttccccggcggcggcttccctggaggtggcggctttcagttcaactttggatanactgtgccatgcaccatgacnt

SEQ ID NO: 3584 - DNA, 229 bp, Zea mays
  misc_feature: Incyte ID No: 700162545H1
  unsure 149, 173, 181, 186, 191, 194, 199, 207, 214, 218, 226: a, t, c, g, or other
gtgagagcaaatacgtttgtgggagaggttcttggacttgaccccagagaggtaaatgttccagtcattggtgggcatgcaggaattacgatactaccactcctttcacaggtgaatccttcctgctcattcacctcggaagaggttanatacctcacttctcgcatacagantggtgggncaaangtacncgnggtanaaggtggnaggggtntaantttttttncag

SEQ ID NO: 3585 - DNA, 142 bp, Zea mays
  misc_feature: Incyte ID No: 700162546H1
  unsure 65, 93, 112, 115: a, t, c, g, or other
gtgcatgtttggtaatttcttaacagcatatgcatcaaagattcttgtgacactcgctgcaatgnttagggacaataagttgataagtttgcncaaacaattgagatttttnccncccagtgcttttttttgcctaatcgta

SEQ ID NO: 3586 - DNA, 237 bp, Zea mays
  misc_feature: Incyte ID No: 700162548H1
gaggaatggctcccgcccaccacacttctgcaagagcagtggtgctgttgcacgcaacatcctgcagcagctgcagattatgggcatcatcgatgtcgatcccaagggtggacgcctcatcaccaaccagggaaggcgtgatctggaccaagtggctggaagggtcgctgttgaagcgtgagcagtgtcatctttggtttcaatggtgtcatgtttgatggttgagaagactgcgct

SEQ ID NO: 3587 - DNA, 67 bp, Zea mays
  misc_feature: Incyte ID No: 700162551H1
  unsure 16, 47, 54: a, t, c, g, or other
taaggtcgcaaactantacttatattgcatggtagtatgattactgnaatgtanggtggttaaggtc

SEQ ID NO: 3588 - DNA, 239 bp, Zea mays
  misc_feature: Incyte ID No: 700162554H1
  unsure 25, 30, 58, 120, 163, 181, 184, 189, 195, 207, 212, 221, 223, 236: a, t, c, g, or other
cagtccccaattatttggcctccgncaganaggggagaaagacccgttcgaggcggcngcgatgtcggggcgcggcaatggcggcaagggtcttggcaagggtggagccaagcgccaccngaaggtgctccgcgacaacatccagggcatcaccaagccggcnatccggaggctgggctcngangggcngcgtgnagcgcaatcttnggggntcatctacnangagacccgcggcntgc

SEQ ID NO: 3589 - DNA, 77 bp, Zea mays
  misc_feature: Incyte ID No: 700162555H1
  unsure 9, 35, 39, 45, 53, 59, 67: a, t, c, g, or other
cagttccanacacacgtccagctgcactgcaccantggncgccgncgaggtcnatgtcncgacttcngctcccgtcg

SEQ ID NO: 3590 - DNA, 66 bp, Zea mays
  misc_feature: Incyte ID No: 700162557H1
  unsure 6, 26, 43, 48, 62: a, t, c, g, or other
gaaggngccccttctccttggttgcnttgcgcctccctcctgnctgcntgcgtgcaatcgangcag

SEQ ID NO: 3591 - DNA, 93 bp, Zea mays
  misc_feature: Incyte ID No: 700162564H1
  unsure 2, 32, 55: a, t, c, g, or other
cngatgtgttgaaggcttgggctgcatcaganggaatccagtacgaggacttganacagctctgtgctgatcctagagcaacagctgctgtct

SEQ ID NO: 3592 - DNA, 72 bp, Zea mays
  misc_feature: Incyte ID No: 700162565H1
  unsure 15, 71: a, t, c, g, or other
atcttcctaaacctnatgtgattaaccttatggatgaacttacactgaagggaattacgcagttctatgcnt

SEQ ID NO: 3593 - DNA, 228 bp, Zea mays
  misc_feature: Incyte ID No: 700162568H1
  unsure 41, 208, 213, 215, 222: a, t, c, g, or other
gctgtccagatcgcgtgattccgcatcccgttcgcgagcgngacacacgctgacagctcacggctgaccttcccgagtcccgacggcctccagctccatcttgattcttgaggcgaacccggtgcgtaagagtctgccatggccagcgagaataaggtctttgggttcgaggaagtcgccaagcacaacgtcaccaaggactgctggntaatnancgcgggnaaggtg

SEQ ID NO: 3594 - DNA, 227 bp, Zea mays
  misc_feature: Incyte ID No: 700162570H1
  unsure 192, 201, 217, 220, 226: a, t, c, g, or other
gcggaaacgatctctaaatcgaagggctgaatcgcccaggcgtccacctgacccatcacctaggcgtcgtcctgattctccgcctattcgtcgccgaccagatccttctcctgtcaggcgtggtggcacacctcctcgcaggagaccactgtctccagttagaaggcgttctccttcaccacctaggaggcntaggtcacngatgcgtcttcacctnggnggggang

SEQ ID NO: 3595 - DNA, 105 bp, Zea mays
  misc_feature: Incyte ID No: 700162571H1
tgattatatgccaaacctgagcatacacgcccaacttcatggacagcacgcagcagagtgcaatctcagttgggaaagaaggatgaagatcgccgtcgattccgc

SEQ ID NO: 3596 - DNA, 228 bp, Zea mays
  misc_feature: Incyte ID No: 700162575H1
  unsure 205, 213, 221: a, t, c, g, or other
ggaagaggagcccgtatccctccgccccgctgcccgccggaccgatggactccgagcactggatctcgcgcctggccgccgcgaagcttctacgcggcgcactcggccacagcgatcgggccgggatggacgagctggagatggacgaggaggtcaggccctagttcccctgcccctactgctacgaggaccacgacgtcggatncctctgcncgcacctngagaagt

SEQ ID NO: 3597 - DNA, 232 bp, Zea mays
  misc_feature: Incyte ID No: 700162576H1
  unsure 35, 39, 183, 205: a, t, c, g, or other
cgatcctgcatctctgcacctgctcgcctccccanggangcagggacaatcgacttcgccgggcgccggctagccccaccggcgacgacaggcacagtggaccacggaggagaaagtactctgctttgaatgggaagtgccatgaacaaagacaaagttcatgacgaggagactcacgggacnagtagtgatataactgagaaancacctgtggaaacggtgaagggtccca

SEQ ID NO: 3598 - DNA, 153 bp, Zea mays
  misc_feature: Incyte ID No: 700162577H1
  unsure 76, 136: a, t, c, g, or other
gtttggtggactagctcgaagcaaaaaaaaatggcacaactctaaataattttgggtcaggccgacccaaaattangcattggaccaggcttagaccaatgtcgtgctccacaggcgggcacgagcacgacccgtntacaaagtttttgcatg

SEQ ID NO: 3599 - DNA, 54 bp, Zea mays
  misc_feature: Incyte ID No: 700162579H1
  unsure 7, 31, 53: a, t, c, g, or other
cggaacncgtgggtccaagcgcccccgcgancgcagctccggcgaatatcgana

SEQ ID NO: 3600 - DNA, 77 bp, Zea mays
  misc_feature: Incyte ID No: 700162580H1
  unsure 4, 14, 34: a, t, c, g, or other
aacncactcatcantcctcactcactcactcaanagttcaaaacgaaagccagctcagctcagctcagctcagctcg

SEQ ID NO: 3601 - DNA, 225 bp, Zea mays
  misc_feature: Incyte ID No: 700162584H1
  unsure 52, 211: a, t, c, g, or other
ggcggaggcggaggagcggaggtatgagatctcgagcaaggcggaggcggangagatgaagacgttcgacccgtggccggtcttcttccgccgggagtggaagcgcaactggcccttcctcacgggtttcgccatcaccggattcatcatcacgaagatgacggccaacttcaccgaggaggacctcaagaactccaagttcgtccaggancacaagaagaagca

SEQ ID NO: 3602 - DNA, 99 bp, Zea mays
  misc_feature: Incyte ID No: 700162590H1
  unsure 61-62, 73, 76: a, t, c, g, or other
tgggttttaatgtccacaattggttggcaaaaaacctggaggcatttacgggcagtttggnnaaaggcgtgangancgctttctccaaacgtttgtgta

SEQ ID NO: 3603 - DNA, 225 bp, Zea mays
  misc_feature: Incyte ID No: 700162591H1
  unsure 212, 217, 219, 223-224: a, t, c, g, or other
ctggcttttatccttttatgatgctgcagttgattatttgtccaccacaagggttatgccaagacttgtagaggttgtcaagggctctactaaagagaaggtggtcagagttgttgtgttgtccttccgcaatttgctggcaaagggtgcatttgctgcccagatgatcgatcttggattgccacaaatggtacaaaacttgaaagctcagnatggntngtgnnt

SEQ ID NO: 3604 - DNA, 70 bp, Zea mays
  misc_feature: Incyte ID No: 700162593H1
  unsure 63: a, t, c, g, or other
cgttcaccccccgccaggaaaaggtcacctagcgatcgtgcacggtcagtttccaggagccanctttcta

SEQ ID NO: 3605 - DNA, 231 bp, Zea mays
  misc_feature: Incyte ID No: 700162594H1
  unsure 160, 194, 218, 223, 230: a, t, c, g, or other
atcagaagccatcgtacatgtttacagataaggagcatcgcggaccatttgagtactcagaggatcttacaggcttgactgaggatccagaaaatgtaatttctgcccaaagatatcaagaaaatgataatgatcttttgctaagtacttcagataaagnggacaatggtacaagagccagcaatggttcttcnacctcgacatacaatgctccttcngattngattagnc

SEQ ID NO: 3606 - DNA, 332 bp, Zea mays
  misc_feature: Incyte ID No: 700405301H1
  unsure 20, 118, 166, 270, 277, 279: a, t, c, g, or other
cgcgtacctcggcgccaggntccccgcctcccggagaaggggaaccgccgtgggggagaggtaccgccacggcggtggcgcccgaggagctgccggagagcgtcgactggagggagangggcgccgttgcgccgtccaagaaccaggggcagtgcggaagttgctnggctttctctgcagtaagctcagtagaaagcgttaaccaaattgttactggtgagatggtgaccttgtccgagcaggagcttgtagagtgctcgactgatgganggaacangnctgcaatggtgggcttatggatgccgcatttgattttatcataaagaacgggg

SEQ ID NO: 3607 - DNA, 283 bp, Zea mays
  misc_feature: Incyte ID No: 700405304H1
  unsure 185, 204, 219, 221, 234, 249, 268: a, t, c, g, or other
ggcaggcggcggccctcgggcattgtcccagcgggagcaggacatccagacgatgctcgccgccgatgtccacctcggcaccaagaactgcgattccaggtggagcgctacgtgtacaagcgccgcactgatgtatctacattattaaccttggaaagactgggacaagcttcattggcgcaggncatcgttgcatgagatccnagacatatgtgcagntntagcctatgcaanaggtgccctaagttncgatacatgtgccagcatntgcagacatctgaat

SEQ ID NO: 3608 - DNA, 318 bp, Zea mays
  misc_feature: Incyte ID No: 700405305H1
  unsure 303, 313: a, t, c, g, or other
agccattgtacgatgtagaggaacttcgctccattgcaccagctgatgtgaaacagtccttcgacattcgttcaataatagcccgtattgttgatggaagtgaatttgatgagttcaaaaaattgtatggaacaacactagtgactggttttgcaaggatatgtgggcaaccagttggaattattggaaacaatggcattttgtttacagagtcagcgttgaagggctcccacttcattgaattgtgcgctcacggcatattcctttgatttccttcaaaacattactgggttcatggtcggntcaagtctgnagtag

SEQ ID NO: 3609 - DNA, 329 bp, Zea mays
  misc_feature: Incyte ID No: 700405307H1
  unsure 2, 61, 317, 323-324: a, t, c, g, or other
cncccttccacccgcgttcgcttcttccccagcatccagcaaggtaggaggaagaagaagntggaggagaggggacggtccgcgaatcctgcctagccttcggccgccttcctccgcttcgagcggcttcgccgatgaaatagcgaaagggcgctatgagttcagcgaatggtacaaccaatgtccatgggaaagaagcagcaccgtatgaggagcagctgttcaagattggtaaagttagaactgacctaggacaactatctggaaaatcagctctatattgctcagatgcttcaattgcaaaggtacctgataancaaggnntgggg

SEQ ID NO: 3610 - DNA, 162 bp, Zea mays
  misc_feature: Incyte ID No: 700405308H1
  unsure 62, 74, 77, 84, 92-93, 136-137, 141, 155, 157: a, t, c, g, or other
atcaaatcaggacaggcatgctgaactaggcgaggtggactgggcgagcgagcgagatggantggacgacggtnganacgaggnacggcgcnnaactgagcgtgcgggctgttcaagccccccgcgtccggaacgnngttngagcggagcccgangnaggac

SEQ ID NO: 3611 - DNA, 320 bp, Zea mays
  misc_feature: Incyte ID No: 700405311H1
ggaacattcggctgtggtacgttcatcattgagggggaagatttcattgcagagaatatcacgtttgagaactcagctccccaggggctctgggcaggccgttgcagtccgggtaaccgcagataggtgtgctttctacaactgccggttcctcggttggcaagacacattatacttacactacgggaaacagtacttaagagactgttatattgaaggccattgtgacttcatctttggtaatctgtcgcccttatggagcatgccatatccattgcaaagcagcgggatacatcactgctcatagccggaagtccaca

SEQ ID NO: 3612 - DNA, 322 bp, Zea mays
  misc_feature: Incyte ID No: 700405312H1
gcggatctacagccaccttggtcaccggcggcgatggcgagttccaagtccggcatccctatcaaggcagaacaagattcggatggctcggcacaaagcacagctgatatgacggcttttgtgcaaaaccttcttatgcagatgcaaaccaggttccaagctatgtcggagaacatcatttcaaagatagatgaaatgggtgcgagaattgatgaattggaacagagcctcaatgacctcaaggctgagataggcggtgaaggcatgtcgacgccatctaagatgaaggaagagtcaagaccttcagacagctccgcttgag

SEQ ID NO: 3613 - DNA, 322 bp, Zea mays
  misc_feature: Incyte ID No: 700405313H1
gagcaacattgagtcttctccagaaggattcaacatgctccgtcgcatgtatgaaactgtccaagagccttttctgaatgcaacaacaatgggtagcgagggtgatcgaaattcgaatccattttctgctcttctaggaaatcaggggtctaaccaagcaagagactcagctgcaaatggaacaactagagcttcagaccccacatcagggtctccagctccaaatactaatccacttccgaatccttggggctcaaatgctggctctgcccaaggagcagcaaggtcctctcctgctagcatgttaggagtactacagcaa

SEQ ID NO: 3614 - DNA, 162 bp, Zea mays
  misc_feature: Incyte ID No: 700405316H1
agcttgtccaggacaggcatgatttgacaccatccatgctttcagtggcacaccatgtgcagcttgagatccttgttgcaatcaagactggaatacaggcctttctgcaccccagtgttaccattccacacaatcgcttggtggaggtcttcttgtacaaga

SEQ ID NO: 3615 - DNA, 142 bp, Zea mays
  misc_feature: Incyte ID No: 700405317H1
  unsure 13, 25, 41, 58, 85: a, t, c, g, or other
ctcgagcggctgnctttccgagatnctctccccacctcacngtccgctagcagataantgggggcagagagatcgagatccggangcgctagggccacccatcagcgttgcggcaatggcgggcacgtgacggtccggggtc

SEQ ID NO: 3616 - DNA, 158 bp, Zea mays
  misc_feature: Incyte ID No: 700405318H1
gggatctgaatattcaaacggaaaacggccacattggcatgccaactaatatctgctgtgtcgttgtggagtaccttcctggtggtgcactaaaatcatttctgataaagaacaggagaaagaagctagcttttaaggtcgttgttcaaatcgctctg

SEQ ID NO: 3617 - DNA, 321 bp, Zea mays
  misc_feature: Incyte ID No: 700405324H1
  unsure 214, 253, 302: a, t, c, g, or other
gcgagagattcctgcaccagaaatcaccctggacctcgaacaggattgttcgaaacgccgacatgccagtggcagcagttctgccttgccgacatgtcttccacgcggattgcttggaggaaagcactgccaagacagaagtccatgaaccaccttgccccctgtgcgcgcgagccactgacgatgaagggcacgtgtcgttctcagaacctcngcatgttgccctccgatctgctcgcaggaacctttcgtngggcatggtgctggtgggaacagcggcatttctgaccctcctcgcactnatcgtggcttgaagaggac

SEQ ID NO: 3618 - DNA, 322 bp, Zea mays
  misc_feature: Incyte ID No: 700405327H1
  unsure 180, 249, 280, 292, 319: a, t, c, g, or other
caggaccacatccactacatcgacggcgggcgggaggtgcagctgtacctggacaagtccaccggcacgggcttccagacgcggggctcctacctcttcggccacttcagcatgcacatgaagctcgtcggcggcgactccgcgggcaccgtcacggccttctacctgtcgtcgcagaantcggagcaggacgagatcgacttcgagttcctgggcaaccggacggggcagccctacatcctgccagancaacgtgttcaccggcggcaagggcgaccgngagcagcggatntacctctggttcgaccccaccaaggantac

SEQ ID NO: 3619 - DNA, 315 bp, Zea mays
  misc_feature: Incyte ID No: 700405329H1
  unsure 248, 266: a, t, c, g, or other
ataggagacgtgctcatttgattggcgaggaaggctatgcagctgaatttagcgatgaggctattgaggcaggagctgttgatccttcgctggtgctggaacaaattgaggctcacattgccacagtgaaagaggaagcctttagcaggaaggatattctcgagaaggttgaaagatggttgaatgcatgtgaggaggaagcttggctggaagattacaacaaagatgacaatcgttataatgccggnaggggggcccattgaccntcaaaagggctgagaaagctcgtattttggttaccagatcccagactgg

SEQ ID NO: 3620 - DNA, 319 bp, Zea mays
  misc_feature: Incyte ID No: 700405331H1
  unsure 198, 215, 259: a, t, c, g, or other
ccaatttgatgaagcttcgttctgattataaagatgaatttgtcacaaagcatggtgtaaaattgggtctatgtcttgcttgtcaaggctgctgtttctgcacttcaaaaccagccaattgtcaatgctgtcattgatggtgatgacatcatatacagagactacgtagacatcagtgttgctgttggcacttccaanggccttgtggttcctgntaaccgagatgctgataccatgaactttgctgacattgagaaanggataaacaaccttgcaaagaaagcaactggagggggcgctctcaattgatgacatggca

SEQ ID NO: 3621 - DNA, 158 bp, Zea mays
  misc_feature: Incyte ID No: 700405332H1
tggctatcatggcgccccacattgtcgtcaacaaaaccgtgatcacattcacagcggtggccctgacgattcttgctgtgacaaccatgatggccgaggccgagacctgtcatccacctccaccggtggctatggcgaggaagccatgaaagtgaggc

SEQ ID NO: 3622 - DNA, 321 bp, Zea mays
  misc_feature: Incyte ID No: 700405334H1
ggcaggcggcggccctcgggcattgtcccagcgggagcaggacatccagatgatgctcgccgccgatgtccaccttcggcaccaagaactgcgactttccaggtggagcgctacgtgtacaagcgccgcactgatggtatctacattattaaccttggaaagactgggacaagcttcagttggccgccagggtcatcgttgccattgagaatccgcaggacattatcgtgcagtctgctaggccctatggccagagggctgtcctcaagtttgcgcagtacactggtgcccatgccattgctggcaggcacactcctggta

SEQ ID NO: 3623 - DNA, 310 bp, Zea mays
  misc_feature: Incyte ID No: 700405336H1
  unsure 15, 88-89, 98, 117, 119, 148, 186, 190, 205-206, 213, 217, 220, 236,244, 254, 259, 266, 284: a, t, c, g, or other
tctagatcgcgagcngccgcccgcgatctagactcgcctacggctgctgcgagctggagaacgccacctgctgtgaggaccactcganntgctgcccncacgactaccccgtctgcnanatccgggacggacctgccgtaagagcgcnaacagcccgatgatggtgaaggctctgcagcgcaagcnggcnatgtatactggcggnngcggcgncggngancaaagcgggaggaacngctatgangaaatgagangtgtnttgcgtngcgtgtatgttcatgttnagacagatgattgctgccatgctgtg

SEQ ID NO: 3624 - DNA, 293 bp, Zea mays
  misc_feature: Incyte ID No: 700405337H1
  unsure 37, 40, 56-57, 197, 226, 246: a, t, c, g, or other
caggccccttaaccctcgttcctctagccgtctcgcncanccacagcctccatttnncctccgacggcggtgcggctagctcaaccatggcggactccaaggccacctcggcggtcaccctccgcactcgcaagttcatgaccaaccgcctgctggcccgcaaacaatttgtgcttgaggttatccaccccggcggngccaacgtctccaaggcggattgaagganaggttgccaagatgtacgangtgaaggaccccaaaccatcttcgtttcaagttcgcaccattggtgg

SEQ ID NO: 3625 - DNA, 318 bp, Zea mays
  misc_feature: Incyte ID No: 700405338H1
  unsure 164, 175, 219, 280, 284, 309: a, t, c, g, or other
gagaggagcttcatcagctcattcaattctcgttccatccctcgtctcttgtgtcccgcctccgttccataattcaccagcgtcgtcctacccatatctcccatcgtcttctccctcgcgccatcagcttccccaagccagcggcgaccatgatctccccgganaccatccgcanggccatcggcgtcatcggcaatggaactgcactcgtgctcttcntctccccagtgcctacgttcatccgcatctggaagaaagggtcggtggaagcatactcgcngatncgtacgtggcgacgctgctgaatgnatgatgtgg

SEQ ID NO: 3626 - DNA, 153 bp, Zea mays
  misc_feature: Incyte ID No: 700405339H1
  unsure 11, 32-34, 36, 50, 59, 73, 85, 92, 99, 128, 138-139, 143: a, t, c, g, or other
cgaacgacganaagagcgtgcgcttccagacnnngntcctggaagcgctntgggctcgncgaggacacgtgcntctccgtgcgtnaaccacnacatctngctcaaccccagcatggaggcctcgcgangccgaggcgnngctngtcatcttct

SEQ ID NO: 3627 - DNA, 321 bp, Zea mays
  misc_feature: Incyte ID No: 700405340H1
gaaacacctccgtagcactcttcaacaagctcgtcctttgttgcatgcaagaacagggcaccttgcttttccccttgggcaccaatgggccactacgtctccgcagcaaagtttgtgaacgctagcaccgtgactataccgacaaatcccagttcagggttcaggatcgagcccaaggttctagctgacactcttaagaatgtatctcggccgtgggtgtatgtttgcggccccacgatcaaccctactggctttctgtacagtgacagtgacatccgagagctgctctccgtatgcgctgaatatggagccagggtagtg

SEQ ID NO: 3628 - DNA, 319 bp, Zea mays
  misc_feature: Incyte ID No: 700405341H1
agtgccgtgcctgatagagcacagttcaatagagacgatttccctgttcagtatgatgctgcaaagttctttgtcattaaatcgtacagtgaggatgacatccacaagagtgtaaaatacaatgtgtgggcaagcacaaccaatggaaacaagaagctcgatgctgcttatcaagaagctcagtcgaagggttctgcgtgccctatattctgtttttttcagtgaatacaagtgggcagtttgttggtgttgctgaaatgacaggggctgtcgattttgagaaaaccctggggtattggcaacaggacaagtggatggt

SEQ ID NO: 3629 - DNA, 315 bp, Zea mays
  misc_feature: Incyte ID No: 700405343H1
cgagagctagctagagggccgtgaaaatgccgatcaataggatcgccctggggagccaccaggaggtgtaccacccgggcgccctcaaggcggcgttcgctgagttcatctccaccctcatcttcgtcttcgccggccagggctccggcatggccttcagcaagctgaccggcggcggcccgacgaccccggcgggcctgatcgcggcggcggtggcgcacgcgttcgcgctgttcgtggcggtgtctgtgggcgcgaacatctccggcgggcacgtgaaccctgccgtgacttcggcgcttcgtgggcggcaaa

SEQ ID NO: 3630 - DNA, 318 bp, Zea mays
  misc_feature: Incyte ID No: 700405344H1
  unsure 303-304: a, t, c, g, or other
gtccttatcatcgccattctcaacgacggcactatcatgaccatctctaaggacagagttaagccgtctccgttgccggacagctggaagctgaaggagatctttgccacgggcatcgtgcttggaagctacctcgctctgatgactgtcattttcttctggggctatgcacaagaccgacttcttctcggacaaattcggtgtgaggtcgatcagggacagtgagcatgagatgatgtccgcgctgtacctccaagtggatatcgtgagccaggctctgatcttcgtcacccggtccggaanntggtccttcgtgga

SEQ ID NO: 3631 - DNA, 303 bp, Zea mays
  misc_feature: Incyte ID No: 700405345H1
  unsure 42, 71: a, t, c, g, or other
gaaaactcaagcacgcggcgatgctgcgccttcgcgcttgcngcggcacggcaccggcatcggtgcccgcnctcgtcaggtcccgctctccaggagatcctcctccacagcctacgccgccgtaccgtcgttccgttcctcctcttcgtccaccctggaagactcgccgccgagcacagaggtttggcaaaggtcattttaaagaaggggaagacccaaatattccgagatgggagccaatggtgtatacggtgctgttgataggatattggtcgactctccgaaattgggatatgttctata

SEQ ID NO: 3632 - DNA, 313 bp, Zea mays
  misc_feature: Incyte ID No: 700405346H1
  unsure 14: a, t, c, g, or other
gcagaattgcgaanaaaagaagacacttgaagcacttctggaaatgttcaataaggataatagagatggatctacttatgatgcctacatggtgatgcaagctatgaggtgttacctacgatgtggagatattgattctgctgttaagatgtttgaagagtattcaagctcgaggtccccacccgctgagttgtatgcgacactgctgagggagctatgattgggtacactccaagaggaatgcaacttgctccaagaaactatagagaagatgacttcaagaatttttcctgaatggccagatgggactgat

SEQ ID NO: 3633 - DNA, 299 bp, Zea mays
  misc_feature: Incyte ID No: 700405347H1
  unsure 192, 200, 220, 255: a, t, c, g, or other
ctagccagtgggattggtttcagataaacagatgatgcaagaagaacacccgttacaagtggcaaggtgtacaaagatcataagccctaatacggatgatgctaaatatgttataaatgtaaaacaaattgcaaagtttgttgttggactgggggataaggtgtctccaactgatatcgaggaagggatganggtcgtgntgatcgcaataagtaccagntcaaatcctcttccaccaaaaattgacccaagtgntacatgatgctgtggaggaaagccagatgtgacgacaatgatgt

SEQ ID NO: 3634 - DNA, 184 bp, Zea mays
  misc_feature: Incyte ID No: 700405348H1
  unsure 121, 138, 140, 163, 174, 177: a, t, c, g, or other
cgcactggttctatgaggacaactccgttgagcacaaccccaacctcaagtccctctctttcaaggacttcacttccctcatgttcaagagctgcactgctctccgggccctacatcgggnaactggatgatattacnanggcttcaacaactacaagttcgnggggctggtgntcnggggcaa

SEQ ID NO: 3635 - DNA, 320 bp, Zea mays
  misc_feature: Incyte ID No: 700405349H1
  unsure 10, 25, 43, 73, 120, 141, 254, 291: a, t, c, g, or other
ctcgccagancggaagcagcgagcngcgcgcgcgatggcaggnggcggtctccagggagccaagaagcgcaancgcgagcacgcggaagggaagacaaagcctcggaagcaagtcaaggnaggcggggacggagcgaacgnaagagccactcggccgccggcggctacactgcccatggcggcgccggcgaattgtggcgaggaagaagaccccggttacccccaaggagaagcgcctcgcggccaaggaaatntcggaggccaggaagatgaagaggaggcagcttacancttgagaaggactaacgaattgtgggaaa

SEQ ID NO: 3636 - DNA, 317 bp, Zea mays
  misc_feature: Incyte ID No: 700405350H1
  unsure 297: a, t, c, g, or other
gaagctcttggctcaccttctggtgttcctcttcccaaaagtcttgaggagcttgagcaggttctaatgcttggcatagaaaagcgacttccaatggtggtagctaatccagattatgtcactgtcgaagctcgagatctccgtgtcatgcctggcactctggcagctaaatatgagagtcttggtggtgaagtgaaatggatggggaagcctgataaggtgatctatacatcagcgatgtccctagcgggcgttgatgctcgtgaatgtatcatggtgggtgattcgctgcaccangacatcaaaggagcgaatgg

SEQ ID NO: 3637 - DNA, 315 bp, Zea mays
  misc_feature: Incyte ID No: 700405351H1
  unsure 287, 296, 309: a, t, c, g, or other
ctctccttccaactcttgtttctgcaacgccagggcgcaaccatgggtcagcagcagcaagggccggcggccaggcggatggccacgctcgcctcccacctgcgccatccctccgtctctcaccctcagatggaagatgttcccctcttgaggggatccaattgccgtgcaaaaggtgcggcgccaggcttcaaagtcgcgatcttgggtgcagcaggtgggattgggcagccacttgcgcaattgatgaagatgaacctcttgtttcggtgctccatctatacgangtcgtcaangcactggtgtaanaccgaa

SEQ ID NO: 3638 - DNA, 155 bp, Zea mays
  misc_feature: Incyte ID No: 700405352H1
  unsure 37, 75-76, 101, 121, 140, 146, 149, 151: a, t, c, g, or other
ctgcaggcactcgtcttcttcctggagagaaaaagcngaagacaatacaaagatgtccaagatggcggaggaganngcggcggcagtgggcggactcgagnagccgggcggcggacgcggngcagcaggcagcagctggncagcanggnangccg

SEQ ID NO: 3639 - DNA, 309 bp, Zea mays
  misc_feature: Incyte ID No: 700405353H1
  unsure 42, 170, 200, 237, 267, 286: a, t, c, g, or other
cgtacagcgagaaggcggccgggaaggcgtacccgggctgcnacgccatcccctgcgaccagttcgaggtggcgttccaggcctggagctgtggatcgccgaccgcgccgtgctccccgtggagaactcgctgggcggcagcatccaccgcaactacgacctgctgctcngcaccggctccacatcgtcggggaggtganctccccgtgcaccactgcctgctggcgctgcccgggnttcccaagaatgcctgacccgcgtgatcancacccgcagcgctggcgantgcgagcacacgctgacagcatg

SEQ ID NO: 3640 - DNA, 313 bp, Zea mays
  misc_feature: Incyte ID No: 700405354H1
tatatctctagccaacacacacataatactctccattccattccattccatctcaaaggatagaataatgggcggtctctccaccaagcttttcgtggtcctcctcctgctcgttcgttacaccgggacgcaaggcgggccggtgactatggtgtcggcgaggaagtgcgagtcgcagagcttccgcttcaagagacttgctcgagggacgccaactgcgcaaacgtctgcctgaccgaagtttcaccggcggcgtgtgcaagggcctacgccaccgctgcttctgcacagggactgctagtatgcctcgctg

SEQ ID NO: 3641 - DNA, 316 bp, Zea mays
  misc_feature: Incyte ID No: 700405356H1
  unsure 105, 111, 178, 216, 267, 277: a, t, c, g, or other
tctactgccaccgccccgacgcgtccacgcccgtcgaggagacggtgcgcgccatgaactgggtcatcgaccaggggctgggcctttctactggggcactccgantggtcngcgcagcagattcaccgaggcctgggccgtcgccaaccgactcgacctcgtcggacccatcgtcgancagcccgagtacaactcttctccagacacaaggttgantctgagttcttgccatttacagcacctatggcattggtttgactacatggngtcctctggnttcaggagtactatctggaaatatggaaagggggcatac

SEQ ID NO: 3642 - DNA, 318 bp, Zea mays
  misc_feature: Incyte ID No: 700405357H1
cgacgtcgcctccaccctgctccgcacccactttccacgactgctttcgtcaggggctgcgacgcgtcagtgctgctcaacgcgacgggcggcagcgaggcggagaaggacgcggcgcccaacctgacgctgcgcggcttcggcttcatcgaccgcatcaaggcgctgctcgagaaggagtgccccggcgtggtgtcctgcgccgacatcgtcgcgctcgccgcccgcgactccgtcggcgtcatcggcggtccttctggagcgtgccgacggggaggcgcgacggcacgtgtccatcaagcaggaggcgctggacca

SEQ ID NO: 3643 - DNA, 314 bp, Zea mays
  misc_feature: Incyte ID No: 700405358H1
  unsure 307: a, t, c, g, or other
cacaaaccagcagcaggcagagcaacgactagctgccaggggtgctagcaagagtgcaacaatggccaccgcgctgtcctttcaaggccttggcactggccgcgctcctctccgtggtcgtcgtcacctctggcgctcgcgccgagcaacagttcaagcgcaacgccaccaccgcctcgcaggacagatccttgttgtctacagcagtggctggctgccggccaaggccactggtacggcgcccccaccggcgcggccccgtcgacaacggtggtgcgtgcgggttcaagggcaccaaccagtaccnttctcgt

SEQ ID NO: 3644 - DNA, 154 bp, Zea mays
  misc_feature: Incyte ID No: 700405359H1
gcgtccatacacacagcagcctttttgttctccccgcgagcgctctctttctctatcgactggcgacgactccgccaccgccgccgctctaacgcgagacgcccaggtcttcgccaacgacgagcatccgggttagagaggaagaaatgcaacc

SEQ ID NO: 3645 - DNA, 153 bp, Zea mays
  misc_feature: Incyte ID No: 700405362H1
  unsure 36, 51, 87, 98, 151: a, t, c, g, or other
gcccaaaccacctctttggccacacacacgcatacngccaccgctactgcntcatcagcagctagcagcaagcggtcggtggtgcancctggcgccgngcaatcgaacacatatggctcagatgatctccaccatgcccatgctggacgcngc

SEQ ID NO: 3646 - DNA, 156 bp, Zea mays
  misc_feature: Incyte ID No: 700405363H1
gggagcagatcaggatcgcccgagccctcctcaattatcgcttgaaggagaagatggcgatggccaactgtcctcatgtttcaccattccccaagaaatttcccatgcagcaagagcggaagccttgtttcggtcaatcttctcaatccagccact

SEQ ID NO: 3647 - DNA, 154 bp, Zea mays
  misc_feature: Incyte ID No: 700405364H1
  unsure 17, 114: a, t, c, g, or other
cccacaccggggcagangccccgagctcagcttagctccactccagctccaatcacagtcgtgaccagagcgcgagagctagctagagggccgtgaaaatgccgatcaataggntcgcctggggagccaccagaagtgtaccacccgggcgcct

SEQ ID NO: 3648 - DNA, 319 bp, Zea mays
  misc_feature: Incyte ID No: 700405365H1
  unsure 95-120, 165, 250, 256: a, t, c, g, or other
gattttcctagaggctggattcagcgattacagaatcacgccgacagcgctgggtttccaatcggtcatcgaggtcttcccctgaggaagaagcnnnnnnnnnnnnnnnnnnnnnnnnnngatcacgctgtgtaggatgtgtcatgtgtgccctgtgcgtaaggnaaaatatataccattattaataagttattaataagacagacatgatgatgagcgtatgggcaaatatacaggagatgcataagantgaganagatttaacgttgtactactgccgtttggattttcacgattacccctgtttacaaggatagtt

SEQ ID NO: 3649 - DNA, 139 bp, Zea mays
  misc_feature: Incyte ID No: 700405366H1
  unsure 128: a, t, c, g, or other
cctcactcccgttccatttccccatctcccagatccaattcgcgagttctccctcctctgccgccatggcgctctctgtggagaagacctcgtctggacgggagtacaaggtcaaggatctctcgcangcggacttcgg

SEQ ID NO: 3650 - DNA, 151 bp, Zea mays
  misc_feature: Incyte ID No: 700405367H1
cgttcgcctcttctcctccctcctgccgggtccttaataaagagcagcagcgcaagaggttggtagagcgagcgagaagaaggcaatggcggcgagagcttcctgttcacctcggagtcggtgaacgaggggcacccagacaagctgtgcg

SEQ ID NO: 3651 - DNA, 302 bp, Zea mays
  misc_feature: Incyte ID No: 700405368H1
  unsure 146, 194, 211, 244, 254, 272, 283, 291-293, 299, 301: a, t, c, g, or other
ggcgatgtcgcgcttcgggcgctccgggcagccggagaaccgcgaatctttctccctcctcgtcctcaacgtctccttccgcactacggctgacgatctcttcccgctcttcgatcgatacggcaaggtcttagacatctacatcncgcgcgaccacaggactggggatccgcgagggttcgcgttcgtgaggnacaattacgaggatgangcgcgggatgccattgacggcttgatgggagangtttaatggngtgcgtcatggtgcattngccaatagganccatgtcnnngattcntng

SEQ ID NO: 3652 - DNA, 310 bp, Zea mays
  misc_feature: Incyte ID No: 700405370H1
  unsure 191: a, t, c, g, or other
gggcttatcttcaccatgagtgcagtccacgaataatccacagggatgtgaagtcaaagaatatcctcctagacaaagactacgaggctcatcttgctgactttggtattgccaagagcttgtgtgtgtcgaagacgcacacatcaacgtacgtgatgggcaccattggctacattgaccctgagtatgcncggacatcccggatcaacgagaatcggatgtgtacagctacggcatgtcttgctggagctgcttaccggcaaaaagctgtcgacgacgagtgcaaccttcaccactggatctatccaag

SEQ ID NO: 3653 - DNA, 304 bp, Zea mays
  misc_feature: Incyte ID No: 700405372H1
  unsure 34, 50, 196, 288: a, t, c, g, or other
tgccaatctccaactcatacccctattccagacnctgattcttccacaanggggcagttgtcggtgatggaggcgttcggcgggttctttcgtggacgagaaggcagcgcgggtggagaacatcttcctcgagttcctgaagcgattcaaggagtctgatggcgcgggggagccgttctacgaggcggagatggangtgatgcggtcgcgggagtccactaccatgtacgtagactttgcgcacgtcatgcgcttcaacggacgtcctccagaaaggccatctctgangagtactcaggtttaa

SEQ ID NO: 3654 - DNA, 154 bp, Zea mays
  misc_feature: Incyte ID No: 700405373H1
  unsure 2: a, t, c, g, or other
gnggatttttagaaaaatctaacattaaggccaaacatcttgcagaattatcttcgtgtctatatatttcgtgttccgattcttgttttcatgttggcatccaaacaccccaactagaaactttcccacgctcttaaactcctgatgcatgggt

SEQ ID NO: 3655 - DNA, 143 bp, Zea mays
  misc_feature: Incyte ID No: 700405374H1
  unsure 77, 88, 109, 111-112, 117, 133: a, t, c, g, or other
catcgatccgccattgctcaccgcacaagtgcacgctcacctcacacacgcagctaagtagctaacgccgtaggagnaaacaagaaanggctcgagcatggccgagganannaagcngggctgcactgctggnattctgggtg

SEQ ID NO: 3656 - DNA, 312 bp, Zea mays
  misc_feature: Incyte ID No: 700405375H1
tcatgcgcgtgcttaccgtctccagcatcttggccaccacaggcacagacgagactgagactgagagcgacgacagtactgtttacaagctcactccggcgtcccgcctcctcgtaagcggcgcgggggcaccgacctcgtgcgacatatcgccgatgctggaccttctgatgcgccccactacgtcggtcgccacctacttcagcctggaagagtggttcaaggacgcgggcgccaccgccacgctcttcgaggtggcgcacggcatgtccccgtggagcttgacgaagaacgacgcgctgtacaacaaga

SEQ ID NO: 3657 - DNA, 138 bp, Zea mays
  misc_feature: Incyte ID No: 700405377H1
  unsure 38, 64, 75-76, 105, 107, 111, 116, 122: a, t, c, g, or other
gtgatggtgaggctgtcgccggcggcgaaggactgaanagcttggccgtcacctggttgggggntcgaacgccannccgccgggctggcggcgcctggagcgcgntngatnctggngatgantcctggccgcagtctg

SEQ ID NO: 3658 - DNA, 306 bp, Zea mays
  misc_feature: Incyte ID No: 700405378H1
  unsure 123: a, t, c, g, or other
tggaccagccgaaagctgccctggagatgctgaggagattcacgcaagggaaactgaagcaggaaccgctccctgagacgatggccttgaaggcggcgatgtgactggcgtggacgtcgtgancggaagaagggagtctcttaattactaggtggtccgaggtgtcgttcaagcgagcgtgtgtcgatcactgagctgctgaagcttgttgtttccattggctcatggatggatgctgttgataagaagttcatgctggaaaccctgtctgtctgctgctctgtaaagcatctcatgtatacaccc

SEQ ID NO: 3659 - DNA, 151 bp, Zea mays
  misc_feature: Incyte ID No: 700405379H1
agatcggcaaggccaatcccgagcagtggtgcgaaacctcgagcgctcgcgccggtgaccataacaaagaggaagccgcggtagcactggtagcggcagcagtaagggggagatgtcgtcggcgttcagcggcgatgagaccgcccctttc

SEQ ID NO: 3660 - DNA, 152 bp, Zea mays
  misc_feature: Incyte ID No: 700405381H1
  unsure 36, 98, 104, 145, 147-149: a, t, c, g, or other
cgcaattagctaggaatagcatccatggcgtccggngctgctgcttcctcgggcctcttgctccttcgtcgcggccttggtggccaccagtgcgaggncgggcnacattcaccatcaccaacaactgcggcttcgacggtgtggngnnngcc

SEQ ID NO: 3661 - DNA, 151 bp, Zea mays
  misc_feature: Incyte ID No: 700405382H1
  unsure 38, 88-89: a, t, c, g, or other
ctccccagcaccagtccccaattatttggcctccgtcngagaggggagaaagacccgttcgaggcggcggcgatgtcggggcgcgganngggcggcaagggtctgggcaagggtggagccaagcgccaccggaaggtgcttccgcgacaat

SEQ ID NO: 3662 - DNA, 148 bp, Zea mays
  misc_feature: Incyte ID No: 700405383H1
  unsure 35, 60, 63, 84, 96, 103, 137: a, t, c, g, or other
ggaacgagcgcgtcccgtgctcgccactcctcgcngatggcgtcctccactctgccagcntcncccttccgtatgtctcttccnggactacgagcnccggacnctgctaaggttaagcacgtatccgttcgaaaccngctcgccgtct

SEQ ID NO: 3663 - DNA, 149 bp, Zea mays
  misc_feature: Incyte ID No: 700405385H1
gccaaatcccgtctcgttgctccggtccgctgcgcatcctcaggaatggaacttgggcgccaccactgccctctaccctctgcaccgctgcaaaaccatttacctggtcaggcatgcccagggattcacaatgtcgcgggggagaagga

SEQ ID NO: 3664 - DNA, 111 bp, Zea mays
  misc_feature: Incyte ID No: 700405387H1
  unsure 4, 19, 21-22, 26, 29, 41, 69, 75, 83, 86: a, t, c, g, or other
agcncagctagcgcctgcncnncttngcntgtgatcatgtnttgcagcagcggcaagtgcgactgtggntccagngctcctgnggnagctcatgcaagtgcatgtcccgag

SEQ ID NO: 3665 - DNA, 310 bp, Zea mays
  misc_feature: Incyte ID No: 700405389H1
  unsure 262, 309: a, t, c, g, or other
ggttattctgaagggtaaaacttgcacaagggcagctttgatattacaacaatggatagattcaagttgattaaggaagttggcgatgggactttgggagtgtatggcgtgctatgaataaacagaatggcgaagttgttgctgttaagaagatgaagaaaaaatattatccttttgaggaatgtatgagtctacgtgaagtaaagtctttgcggcgcatgaatcatcctaacattgtgaagctcaaagaggttatcagggnaaatgatatattatacttccataatggaatacctgggagggtaatcnc

SEQ ID NO: 3666 - DNA, 150 bp, Zea mays
  misc_feature: Incyte ID No: 700405390H1
ccgtgggcagcacccctgaagaaaaagcaacacttgaagcccgtttcatccgagaagtaaatatgatgtgtaaagtgaaacatgagaatcttgtcaagtttattggagcttgcaaagaaccattgatggtgatcgttagtgagctactac

SEQ ID NO: 3667 - DNA, 149 bp, Zea mays
  misc_feature: Incyte ID No: 700405391H1
gtcaagaagggctcccacatgttgcagatcgatgtcgacaccgagaaaggaggcctggctgtcaaccccaactttcttcgtcgattttggcaccgagcctgatggtcctgccctggcccacgagatgagatatcctggtggggactgca

SEQ ID NO: 3668 - DNA, 149 bp, Zea mays
  misc_feature: Incyte ID No: 700405392H1
ggcaatgcatggtagtctgtgggcggagtcacagaagcctgacgaaactttaaaagctcctgtgtttgatatgtcagaattagaaaatcttttctcagctgcactgccaagttcagattcaaggcgttcagataagtcaggcagtcgtg

SEQ ID NO: 3669 - DNA, 147 bp, Zea mays
  misc_feature: Incyte ID No: 700405393H1
gaggcgcagagcatcgacgatggcgagcggcagcatgaagagggagatcagcgagacccacgacaccctccgttcggcctcaatgccggcgtcaaggccgacctcgcgccgccgcacccgctccagtccagcatccaatcggaggcg

SEQ ID NO: 3670 - DNA, 320 bp, Zea mays
  misc_feature: Incyte ID No: 700405401H1
  unsure 99: a, t, c, g, or other
cggcatggtcaccacgctggccaccgccagcgacaagaagatggactacagctacgacgtcaagaacaaaggcgagacggtcacgctgcagaccagggncgtcacgtccagcgtcaccgccaccgttggcgacatggagccgttggccgtgtatgccgtgaacaagttcctgcagcccaaggagctcttcaaggtcgtcgaggcgcccgcgcccgcgccggagccgtccaagaagaagaaggctggtcgcggcgggagtgacgacgattcctcggacgattcgggagattcgaccgccgatgctgagaagggcgacgcag

SEQ ID NO: 3671 - DNA, 318 bp, Zea mays
  misc_feature: Incyte ID No: 700405402H1
ttatcatcctcaacgccatggccgtgctgatgctcccgctctacctcttcgccacccctatcctgcgcttcttccaccaggacgccgagattgccgcgctcgccggccgcctagcgctctacatgatcccgcagctcttcgcctacgccttcaacttccccatccagaagttcctgcaggcgcagagcaaggtgatggccatggcggtcgtgtcggtggcggcgctgctgctccacgtcgccatcagctggctcctcatggggcccatggggatggggatcgtcggcctggccgtcgcgctcaacgcgtcttggtggc

SEQ ID NO: 3672 - DNA, 294 bp, Zea mays
  misc_feature: Incyte ID No: 700405405H1
  unsure 3, 22: a, t, c, g, or other
ggnacgagcgggagtgggacangcccatggagttcgtgccggagcgattcctgtcaggcggcgacggcgagggcgtcgacgtgactggcagcagggagatcaagatgatgccctttggcgccgggcggcggatttgcgccgggctcggcatcgccatgcttcacttggagtacttcgtcgccaacttggtcagggaattcgaatggaaagaggtggccggcgacgaggtggatttgtctgagacgcgcgagttcaccaccgtcatgaagaaaccgctccgcgcgcactggtgcg

SEQ ID NO: 3673 - DNA, 114 bp, Zea mays
  misc_feature: Incyte ID No: 700405406H1
  unsure 22, 58-59, 74, 80: a, t, c, g, or other
tctcgcttccaagcacaccacnactccacagtgcacttcactctacagcaacgacagnnaagtgagcagcagcntcagcngtgccatggaggcgtggagatctctcctcgcgag

SEQ ID NO: 3674 - DNA, 315 bp, Zea mays
  misc_feature: Incyte ID No: 700405408H1
ggttttgagaaacgatttagtgtcctgcacatatccaatatgatacttgctattgggagtatgattttccatgccaccttgcaacttctcctacaacagagtgatgagactcctatggtttgggagatccttctctacatgtatgtcctctattcaccggactggcactacaggagcacaatgccaactttcctgttcctgtatggtgctgcctttgccgtagtacatttctttgcccggttccaagtcgtattcaagctgcattacgttggcctctgcttgctctgcatcccccggatgtacaagtactacata

SEQ ID NO: 3675 - DNA, 317 bp, Zea mays
  misc_feature: Incyte ID No: 700405409H1
cggccactccctagcacatcaaaccctagctccgcccagcccccaaccatgtcggcgatgatgcaaccgcagatcatcctgctcaaggagggcacggacacgtcgcaggggcgcgctcaggtggtgagcaatatcaacgcgtgcacggcggtgggcgacaccgtgcggaccacgctggggcctcgggggatggacaagctcatccacgacgacaagggcggagtcaccatctccaacgacggcgccaccatcatgcgcctcctcgacatcgtgcaccccgccgccaaaatccttgtcgacatcgccaagtcgcagga

SEQ ID NO: 3676 - DNA, 315 bp, Zea mays
  misc_feature: Incyte ID No: 700405410H1
  unsure 30: a, t, c, g, or other
cgccgagggcctgggcctgtcgcgcgaggnggcctgccacaacctcctcttcgccaccaccttcaacagctacggcggcctcaaggtgctgttcccgggcctgctggccaacgtggccagcggcggcgagaagctccacgagcggctggtggccgagatccgcggcgccgtggccgacgccggcggcaaggtcaccctcgcggcggtggagaggatggagctggccaagtcggtggtgtgggagtcgctgcgcctggacccgcccgtcaagttccagtacgggcacgccaagaaggacctgctggtggagagcca

SEQ ID NO: 3677 - DNA, 314 bp, Zea mays
  misc_feature: Incyte ID No: 700405411H1
actcgaggacctatgtaatgctgggattatagtatggagtgaattctggcaggcattgctacagttggataaaagggctggaggcatgaaggatccaactggtcttatgggcaagaagcaattcaccatcttccacttcaatggaattgccaagtctgtgctgaatgggaatgcaagtgcaggtggttcatgtcctatacagagacccaggttatgcaagctaaatgtcactgtccccccaaggtggactcaagatgagtatctggctgatgttgtaagcgcatcaaccagcagcagcaaggacgatagtattc

SEQ ID NO: 3678 - DNA, 311 bp, Zea mays
  misc_feature: Incyte ID No: 700405412H1
aaagaacctgtcgtgctagttgtaaacaaggcagatggagatgaagaggtcaaagctgctggggataacatagtgggcgttgttcttctacaagaattacctcacctatcacatcttggtgttagagctcgtcaagagaaagttgtatttgtaacttgtgaagacgatgacacgattaaaaacatgaggttacttgagggaaaacatgtcaggttgggtgcatcatccaataatgttgatctttcagttgtatcaaacaaagatgactgtgctgccatgtctcagagccatccgctggaggagatctattt

SEQ ID NO: 3679 - DNA, 132 bp, Zea mays
  misc_feature: Incyte ID No: 700405415H1
gaaatggtggccataaagatcatcaggggcattaagaagtacagggatgctgcaatgatcgaaattggcatgcttgagaagcttggtaaatatggtgaaagcagatccagttatgcatgaattgcgcctcat

SEQ ID NO: 3680 - DNA, 108 bp, Zea mays
  misc_feature: Incyte ID No: 700405416H1
ccgcattctcgcgtcggcttgcttttaactgaatccagcccaccgcttctcgcacgtcgccatggacgcggtcgattctgtggtggatcccctccgcgacttcgccaa

SEQ ID NO: 3681 - DNA, 312 bp, Zea mays
  misc_feature: Incyte ID No: 700405417H1
  unsure 295: a, t, c, g, or other
caacaaggcagcagcacaagcaagaaccacacctcctcccttcgcctgtgatcatgtcgtcttgctgcggcggcaagtgcgggtgcggctccagctgctcctgcggcagcggatgcaacggctgcggtatgtaccctgacgtggagaccgccgccaccagcagcgtcaagaccacggtcctcgccgcgccgaccaccaaggccagcgccggcggcttcgaggcggccaccgagggcggcggctgcgactgcaacacctgcaatgcggcaccagctgcggctgctcctgctgcagngcaatgagctggcccgg

SEQ ID NO: 3682 - DNA, 313 bp, Zea mays
  misc_feature: Incyte ID No: 700405418H1
gaaacacctccgtagcactcttcaacaagctcgtcctttgttgcatgcaagaacagggcaccttgcttttccccttgggcaccaatggccactacgtctccgcagcaaagtttgtgaacgctagcaccgtgactataccgacaaatcccagttcagggttcaggatcgagcccaaggttctagctgacactcttaagaatgtatctcggccgtgggtgtatgtttgcggccccacgatcaaccctactggctttctgtacagtgacagtgacatccgagagctgctctccgtatgcgctgaatatggagccag

SEQ ID NO: 3683 - DNA, 155 bp, Zea mays
  misc_feature: Incyte ID No: 700405424H1
  unsure 45, 49, 57-76, 101, 131: a, t, c, g, or other
cgcacgccatcagcagctagcgcgctcctcgagcccagcagaganaggncggcctannnnnnnnnnnnnnnnnnnngctccagtctccaccggcagcgtanttcgtaatagccatgggtccaccgctggcnacgtggccgcggtggtggacgagg

SEQ ID NO: 3684 - DNA, 310 bp, Zea mays
  misc_feature: Incyte ID No: 700405425H1
ctcgagacccaccaccgcaccccgcgctcggcggactcttttgctgctgcacctgccatcgtcacgcaccggtgtgtggagcgaaccagcgagcgagaagtagccacagagcggcctgtgcgtgcgtgcagatcgagagagagacgaacagagagagcgattcatggtaggtgcgatgcgcggcggagcatggagttggaggaccgcctggccacccttcctcgcttccgcggcgatcacgatgacgacggcaaggaaaggaggacagggacggtatggacggcaacggcgcacatcatcacggcggtga

SEQ ID NO: 3685 - DNA, 256 bp, Zea mays
  misc_feature: Incyte ID No: 700405426H1
tccaatccagcctccaattgacctcctttctagcccaaggatccaatccaagcacctaattccatcccatccggatggggcgatggcgatgctgcatcggggacggggaggaggtgccccaagcacccgtcggagccgcccttcaccggcttctgctccgcctgcctcctcgacaggctccacgctaccaacctaattggtgtggttgtggcctccccttcccggccgcctcgtccgccttcgcttcccttccacc

SEQ ID NO: 3686 - DNA, 309 bp, Zea mays
  misc_feature: Incyte ID No: 700405427H1
gtctactaatcatggggagctcaaaagctgagatcccacctgagaagtccatcaccctgtcctaccttatggccccaaggctggctcgccgtggtggagttgacgagccctttgcatgggaaagcagagagtttctaaggaagctttgtatagggaaggaggtcacattcagagtggattatacggctcctaatattggacgagaattcggaactgtttatctaggtgacaagaatgttgcgtactcagtaatttctgctggatgggcaagggtaaaggagcaaggcccaaaggggggcgaacaaaatt

SEQ ID NO: 3687 - DNA, 104 bp, Zea mays
  misc_feature: Incyte ID No: 700405431H1
  unsure 40, 71, 80: a, t, c, g, or other
tagcaacgcgcagtaagcagcgtgggcaaagctacgagcncccggctagcttcgccatgaacatgggtggngtgtccccntcgacagtccggtgcaagcactgc

SEQ ID NO: 3688 - DNA, 105 bp, Zea mays
  misc_feature: Incyte ID No: 700405432H1
  unsure 101, 103: a, t, c, g, or other
aaaaaccgtatcgtctcgcctgttcagtttccttctcttcccgcagcccggtttgccgaccaggttccaccgttccagagtagccaagcgaatcccaacgnangg

SEQ ID NO: 3689 - DNA, 265 bp, Zea mays
  misc_feature: Incyte ID No: 700405434H1
agcacagctagcgcctgctccccttcgcctgtgatcatgtcttgcagcagcggcaagtgcgactgtggctccagctgctcctgcggcagtcatgcaactgcatgtcccctaacgtggagaccgccgccgccagcagcatcaagaccacggtcctcgccgcgccgaccaccaaggccagcgccggcggcttcgaggcggccaccgagggcggcggctgcgactgcaacacctgcaatgcggcaccagtgcggctgctcctgctgca

SEQ ID NO: 3690 - DNA, 306 bp, Zea mays
  misc_feature: Incyte ID No: 700405436H1
gaggaggccatggacgaaggagccaagtagaaagctagcaggcaccgcaaccaacggtaaagctggtggtcgagcaagttttaatttgtcaagagcgagctcatggaggatggcagtgctccaagacgggctactccggcccccacccgcaggagcagatctgccgacttccacaatttttcagaaaggaggaggagggacaggatcaacgagaaactgagggcgttgcaggagcttcttccaaactgcaccaagaccgacaaagtttccatgctagatgaagcgatcgactacctaaaatccctc

SEQ ID NO: 3691 - DNA, 303 bp, Zea mays
  misc_feature: Incyte ID No: 700405437H1
cgcgtctgcgatgttccatgatcagctgtactatgtgaaccaggagcttacggttgaggattttctttatgatgatgattacaagatagatctttctgggtctaatctggatgtcattaataacctagaagggattgttcagctggaatatccagatcacaatttgccacaagagttagcccctaatgcataccttgacatgaatagttgtgggcagagtgccggggctgttttcctgcacatgccagatttgctcacaacaatgacttcagcaccttctgcattcctgaagccaaaatgcgc

SEQ ID NO: 3692 - DNA, 306 bp, Zea mays
  misc_feature: Incyte ID No: 700405438H1
  unsure 175, 197, 204: a, t, c, g, or other
gccgctcctgggcggcgcccccgacgcggcggtggtggacaagcacgcggagcagcttcgccaaggtgctcgacgtgtacgaggcgcacctcgcccgcaacaagtacctcgccggggacgagttcacgctcgccgacgccaaccacgcgtcctacctgctctacctcagcaaganccccaaggccgggcttgtcgcngcccgcncccacgtcaaggcctggtgggaggccatcgtcgcccgccccgcgttccagaagaccgtcgccgccatccccttgcccccgccgccctcctcctcggcttgac

SEQ ID NO: 3693 - DNA, 301 bp, Zea mays
  misc_feature: Incyte ID No: 700405439H1
gaacattctttacaactgctgttgttgcggtggtattgagggggctgattgagttctgtcgtagtggaaaatgtggtctcttgggcaaggtggattgatcatgtttgatctcagttcaactgttgcagtctacagtactccagatctaattgcaattatagtcctgggataattggtggaatctttggaggcctcttcaactatctgttggacaagatcctccgagtttatagtattatcaacgagagaggtgctccattcaagatccttctcactataacaatatcaataatcacatcaa

SEQ ID NO: 3694 - DNA, 304 bp, Zea mays
  misc_feature: Incyte ID No: 700405440H1
  unsure 48: a, t, c, g, or other
gggagctgcagagcctcatgaggcgtggagcaagaacgtacttgagangctcacttctgatgctcagaggctgttgagcatccaagcgagcattgaagagctgaagcagaaaatggaggggcagtcaaagggaaaatcccctatgaactctgagtacagcagtgtgagcgctcaggtgcatgagacagagggccatgtcttggaacagatcaatctgaacaacaaattgactaggacggctgagaactaccccacactgtcagataatatgagcaccgagcgagaagggtattccagcaggagg

SEQ ID NO: 3695 - DNA, 304 bp, Zea mays
  misc_feature: Incyte ID No: 700405441H1
  unsure 29, 78-109: a, t, c, g, or other
ccgaaccctagccaccaagccggagggangagagcagccatggcgcggtgcctcgcgctcgtcgccctcctcgtactnnnnnnnnnnnnnnnnnnnnnnnnnnnnnnnncgcccttcgtcgtcgcgcacaagaaaatttcgctctcccgccccaagccgggcgtcgagcgcgtcgctgtctccctcgacctctacaaccagggatccgcgactgcctatgatgtgtccattaatgacgactcttggccaacagaagtgtttgagcttgtcactggagagaaatcgaagacattggaaaggcttg

SEQ ID NO: 3696 - DNA, 299 bp, Zea mays
  misc_feature: Incyte ID No: 700405444H1
gtttttgagaagcagaaagcgctcattttgatcggagagagattgcttcttacaactattcgatttgatttcaacattcagcatccttatagaccacttcttgatgccatgcaaaatcttggcatcaatcaaaaagaagtgaaacaagtagcatggaactttgtgaatgactggcttaaaacaacattgtgtctacagtataaaccccagtacatagctgctggttcccttatctggctgcaaagcttcacaatatcaagcttcccttgcatggagcgcatgtttggtggcaccaattt

SEQ ID NO: 3697 - DNA, 158 bp, Zea mays
  misc_feature: Incyte ID No: 700405445H1
catacacaagcacaagcgcactctagcaatggcttctgaggttgtccgccctagcgacgccgagctactaaaggcacaagccgacatatggcggctcagcctctcctacctcacgcccctgtcactgaggtgcgccgtggagcttggcatccccacgg

SEQ ID NO: 3698 - DNA, 98 bp, Zea mays
  misc_feature: Incyte ID No: 700405446H1
  unsure 17, 32, 42-43, 47, 93: a, t, c, g, or other
gatcgatcgaacgatcnatcagaagttcagantctatctctnntgcncctggttcaccattgcgcaaattggagcaagatgggaaggctagcnctggg

SEQ ID NO: 3699 - DNA, 306 bp, Zea mays
  misc_feature: Incyte ID No: 700405451H1
gggcacaagcagcgacacagactatgtgcctaccaaagatggaagccatgaaccccatgaatcaacaacacatgagccatcaaagggcatgactgatgatgacgagttggactggggagcagatgaagcggaagctgaagctgatggcactgttacggcagaggcatcggcacagctgtgctcgctgagaaggaaagcagtagatgacgggcgcaaactattgaatggtcacaaccgcagggccaagaattctctaggctgaacaaaaggcagaagacagcgctacccaggtatttggggcttcac

SEQ ID NO: 3700 - DNA, 303 bp, Zea mays
  misc_feature: Incyte ID No: 700405453H1
cagagcaaaaaaaatatattatcgaatactaaagcattttcctcatcgatagaatatagaattttaaaaagggagcgaaataggttttttcctttttgcagctccgtcgtccaccaacctcctccgatccggccgccgcagcgtagccgaattgtcccctcgctagcttctccggccggctagaggctgtttcaggcggcctcgatctcctccgcgcggctgaggaaggagatcacgcggttgctcaggggctggggcgtgcatgatgggattttggttgattccgatggagactccggcgag

SEQ ID NO: 3701 - DNA, 301 bp, Zea mays
  misc_feature: Incyte ID No: 700405454H1
gaaagggcaacggagcttggtttctttggtttttgattagtagctgtggaaccttgaaccgatagctgaattttcttgtaaggccctgtttggaagcaacccggttttttagaaaccagtttttatattttagctaggagaggccagcttcttggtttttaagaaactgagaatctaatttctataaacttagtcataaactagtatgtttggaaccacctcaatttctataaaccagtttcttaaaaactgggtgtttccaaacagggcctaagtcactgtagtgcttagccagttgtaa

SEQ ID NO: 3702 - DNA, 302 bp, Zea mays
  misc_feature: Incyte ID No: 700405456H1
gttgccaacccaaagaagccatttgccgctattgttggtggatccaaggtctcaagtaagattggtgtcattgagtcgttgctggcgaaggtcgatatcctcatccttggtggtggtatgatctacacattttacaaggcacaaggatattctgttggaaaatctctcgtggaagaggataaacttgagctcgcaacttctcttattgagaaggcgaaggcaaagggggtttctctttgcttcccactgatattgtagtagcggacaagtttgcagccgatgctgagagcaagattgtcccc

SEQ ID NO: 3703 - DNA, 274 bp, Zea mays
  misc_feature: Incyte ID No: 700405458H1
agcacagctagcgcctgctccccttcgcctgtgatcatgtcttgcagcagcggcaagtgcgactgtggctccagctgctcctgcggcagctcatgcaactgcatgtcccctaacgtggagaccgccgccgccagcagcatcaagaccacggtcctcgccgcgccgaccaccaaggccagcgccggcggcttcgaggcggccaccgagggcggcggctgcgactgcaacactgcaatgcggcaccagtgcggctgctcctgctgcagtgcaatgg

SEQ ID NO: 3704 - DNA, 305 bp, Zea mays
  misc_feature: Incyte ID No: 700405459H1
gcaggctccatcaccagctcagccagcagctgcaccaccagtgcagtcatctgccgcctctgcaaggcctaatgcaaatcctctgaacctttttcctcagggtgtcccaagtggtggggccaatccaggtgttgttccagctgcaggatctggtgcccttgatgccttgcgacagttccacagtttcaagcactgcttcagttggtccaggctaatcctcaaatcttgcagccaatgcttcaagaactaggcaaacaaaacccacaaatcctgcgtttgattcaggaaaatcaagctgagtttgt

SEQ ID NO: 3705 - DNA, 307 bp, Zea mays
  misc_feature: Incyte ID No: 700405460H1
gccgccgtttcccgtccgcggcggcgcctcctcccctcccactcctactcgttgtcgatctcgtctcgggtaccatggcaagatcactctccaccgccctcatgaggggacttatgagatcgtcccgtgcatcgacatcagctgctgtgtcacgaccagctatccagcagtttatgaactattcatcaggtcttagtggcactcctaatgcaaatggggactcagtgacaacacgagtagctgctgatcacgacacccatcaagattttcagccaacaagtaaaagttcagatatgtctttcagtga

SEQ ID NO: 3706 - DNA, 297 bp, Zea mays
  misc_feature: Incyte ID No: 700405461H1
gtcttctccgcgaaatcttcctctgtctgtcgtgtctttgttctggtcgtttcccgattcggtagttggcttggggatttcactgcaagtctagggattttctgtagggaagttgatcgagaagtcttggtagacatggagcagatccagtactccgagaagtacttcgacgacacctatgaatacaggcacgtcgtcctcccgcccgaggtcgccaagctcctccccaggaacatccttctctccgagaagcagtggcggttggtgggtgtgcagcagagccgcgggtgggtgcat

SEQ ID NO: 3707 - DNA, 307 bp, Zea mays
  misc_feature: Incyte ID No: 700405462H1
tgcttttctcgatactccatacactcattcgcttacagcatcagcacaggatgatataactggagcacaaccactacaatctcgttggaagaaacctcgcaaaataatctgcagaacaaattgctttgtatgcaaagaggcttcaacatctggacaaaatccagaagatgttgcagacaactccagaacaatatgcgagaaccagaagtgggtctggtccgaagacatttcctcagcgtcggtgcagctgtcattcatgtcgtaacgaaagagcccctgatggcctggtagctgacgcacacctttg

SEQ ID NO: 3708 - DNA, 309 bp, Zea mays
  misc_feature: Incyte ID No: 700405463H1
gttgatcgaggtgagtgaggttgaaaagcacaccatcgtcatggacggcggatactacggcggtcgcgatcagcgctacagcggcgggtactacggcggcggtggcatcgcaacgccggggtacgctccggcggtcccgtacgggatgtcgcaggtgaacatcgagggcaacgggtgcgggcgggcgctgccgccgcagccgaccgtgaaggtgtactgccgcgccaaccccaactacgccatgagcgtccgcgacgggaaggtggtgctggcgccggcgaaccccaaggacgagtaccagcactggat

SEQ ID NO: 3709 - DNA, 220 bp, Zea mays
  misc_feature: Incyte ID No: 700405464H1
  unsure 80: a, t, c, g, or other
caacaccgcaccacactacccagcggaatccgcccacccgcacccgcagcagaggagatatgtcgcaggggaagggaggngcggcgaggaaggaggaggtggtcaccagggagtacaccatcaacctccacaagcgcctccacggctgcacattcaagaagaaggcacccaacgccatcaaggagatcaggaatttgcgcagaaggccatgggcaccacg

SEQ ID NO: 3710 - DNA, 179 bp, Zea mays
  misc_feature: Incyte ID No: 700405465H1
gttactacagaagccatgatagagcacatgaacaaccttctcaaaataagaggatcgaaggttctgtttggtggtgaaccgttagggaatcactcaattcccaaaatttatggtgccatgaagcctactgctgtatttgttcctctagaagaaattctaaaaagtgggaacttcgagct

SEQ ID NO: 3711 - DNA, 186 bp, Zea mays
  misc_feature: Incyte ID No: 700405468H1
  unsure 52, 180-181: a, t, c, g, or other
cggggccatgcagagctccgtaaagctcgcggtgcttgctcttctgctagcngcagcagctcaccacggtctgctgccgctgccgacggcgcgatgctactggctcaacccggagatctacgacgccggcgcgctgagccgccgcgcgttcccggatggcttcgtcttcgggaggctgcnncggcg

SEQ ID NO: 3712 - DNA, 297 bp, Zea mays
  misc_feature: Incyte ID No: 700405469H1
ctccggcatcgccgcggtcgcttgggttttcttcttcacgtgcctcccggagacacgcggccggacgctggaggagatgggcaagctgttcggcatgccagacacgggcatggctgaagaagcagaagacgccgcagccaaggagaaggtggtggaactgcctagcagcaagtaggtggctatcccagagcacaggtcaagtgaagtagatggacaagatcattgtcttttcaactaattagatgggcaagaataactaagactgcctatgaggtgtcgtggttcaaccagaatcat

SEQ ID NO: 3713 - DNA, 298 bp, Zea mays
  misc_feature: Incyte ID No: 700405471H1
ctcatgtccgccgggctgtcgacggagctccgccacaagtacaacgtgcgctccatcccgatccgcaaggacgacgaggtgcaggtcgtgcgcggcacctacaagggccgtgaggggaaggtggtgcaggtgtaccgccgccgctgggtcatccacgtcgagcggatcacccgcgagaaggtgaacggctccaccgtgaacgtgggcatccacccctccaaagtgatcgtcaccaagctgaagtcgacaaggaccgtaaggctctcctcgaccgcaaggcccggggccgcgccgccga

SEQ ID NO: 3714 - DNA, 298 bp, Zea mays
  misc_feature: Incyte ID No: 700405472H1
ggcagggcactgcactgcacgcatgcactgacctgacgacgacgcgcgccacagtccacagctcctcactcagacatggcgatgggcgccgcttccatcctactgatgatggtttcgctggagaccctgcttctcgccgccggcgccggcgccggcgggaccatccgtctgtccagcgatgtcggaggcgttgctgcagaccttgtcacggcgatggcgaggggcgagggcaagggcaaagcatcagcttcgcgacgaagagaggccgtggggggaatgctgcgacttggcctatgcg

SEQ ID NO: 3715 - DNA, 297 bp, Zea mays
  misc_feature: Incyte ID No: 700405473H1
catcaacgcctccaacccctaccacgagtgctccgactactgcttcaagcgcatcgccgacgccaaatcagggcttgagcgtggggaacaacagccaccagctgacgtggccaccgctgccggcacgtctgatgccgtggagcagcagcaacttgaagataacgatgccgacggacaggagggcgcagcgcggatgacggctacccgcagatgacggaaaagcagaagaagctgttcgagctgcgccttaagatgaatgaagcgcggaaagcgaatcagcaggcaatggttgccgag

SEQ ID NO: 3716 - DNA, 298 bp, Zea mays
  misc_feature: Incyte ID No: 700405474H1
  unsure 133, 295, 297: a, t, c, g, or other
ggatgagggggagcaatggcagagccgggccagcagttgctgcggtcgttcgtggaggtggcagcgggctcgcacttccctatccagaacctgccctttcggggtcttccgccggcgggggtcgccaccgcangctccgcgccccggggtggccatcggggacttcgcgctcgacctcgccaccgtcgccgacgcgggtctcttcgacgggcccgcgtctccggctccccgtgcttccaccaggagacgctcaacatgttcttggggatgggccgaccggcgtggaaggagcgcncnc

SEQ ID NO: 3717 - DNA, 299 bp, Zea mays
  misc_feature: Incyte ID No: 700405475H1
ccgcattctcgcgtcggcttgcttttaactgaatccagcccaccgcttctcgcacgtcgccatggacgcggtcgattctgtggtggatcccctccgcgacttcgccaaggacagcgtccgcctcgtcaagcgctgccacaagcctgaccgcaaggagttcaccaaggtggcagcgcggacggcgatagggttcgtcgtcatgggcttcgtcggcttcttcgtcaagctcatcttcattcccatcaacaacattatcgtcggttccggctaggctcagggcgcgatagcatgggagtatg

SEQ ID NO: 3718 - DNA, 303 bp, Zea mays
  misc_feature: Incyte ID No: 700405478H1
  unsure 52: a, t, c, g, or other
ccggcagcttccgcaccttcgacctgagctactaccgcggcgtgctcaagcngcggggcctgttccagtccgacgccgcgctcatcaccgacgccgcctccaaggccgacatcctcagcgtgatcaacgcgccgcccgaggtgttcttccaggtcttcgcgggctccatggtcaagatgggcgccatcgaggtcaagaccggctccgagggcgagatcaggaagcactgcgccctcgtcaacaagcactaggcggcggaattcatgcgggagatggctcattgctcgcaaaaaatccttgtga

SEQ ID NO: 3719 - DNA, 113 bp, Zea mays
  misc_feature: Incyte ID No: 700405480H1
  unsure 42, 98, 102, 112: a, t, c, g, or other
gatcgccaaatcaacttgagcttgagcatcccaccaatccantccccaacagcaatggacgccgcccagcggccgcgtcggtacccaccttccagcgnccgngccgcccgcng

SEQ ID NO: 3720 - DNA, 295 bp, Zea mays
  misc_feature: Incyte ID No: 700405481H1
gattcttccttttattgagcttgaccttaaggaaattgcacaaactttttctaagtttgcctgcaatgcgcataccatatgtgaccctgaacttaggcctcttgggactggactgtaccctgtcatatccattattaaccacagttgtgtaccaaatgcagttttgatatttgatggtaggacagcatatgttcgtgcattgcaaccgataaataaagatgaagaggtatctataagctacattgagactgcggcagtcaccaagaagagaaacaatgatctgaaacagtacttc

SEQ ID NO: 3721 - DNA, 290 bp, Zea mays
  misc_feature: Incyte ID No: 700405484H1
  unsure 143: a, t, c, g, or other
cgcaccgacaccaatacgccatgggttccatcatggagcaacgctgcaacaacgatccgcaggcgctgctcgacgctcagctcgagctctggcacagcacgttcgcgttcatcaagtccatggcgttcaagtcggcgctgganctcggcatcgccgacgccatccactgccacggcggcaccgccacgctcacccagatagccaccaaggccgcgtccacccgtccaagacaccgtgcctgcgcaggctcatgcgcgcgctcacagtcgccggcatcttcaggtcgccaa

SEQ ID NO: 3722 - DNA, 121 bp, Zea mays
  misc_feature: Incyte ID No: 700405485H1
  unsure 88: a, t, c, g, or other
cactgcaacagccaagtgcaagtgatcgagctcccccctcctcatcagtcgctaggcacagcgcacttgcaggatggcgcaggtctcnaagacgcttctccttgtggccctggtgttcgtg

SEQ ID NO: 3723 - DNA, 291 bp, Zea mays
  misc_feature: Incyte ID No: 700405489H1
ctgcaagaaagcaacgggcagcaagaaaccttgtaaacatcggagcatagatcgcggcggtgatggcggccaaggtgaggacggagctggacgtgggcgccgacggcgtggccgtaatcaccatctacaatccgcccgtcaactccctctccatcgacgtcttacatagcttaaaagaaagctatgaagaagcacttcggagaaacgatgttaaagctattgtcgttacagggaaaggagggaaattttctggaggatttgatattagttcctttggtggtgttcaaggag

SEQ ID NO: 3724 - DNA, 158 bp, Zea mays
  misc_feature: Incyte ID No: 700405491H1
  unsure 28, 32, 51, 57, 73, 80, 95, 99, 120, 140-141, 146, 148, 152: a, t, c, g, or other
gggcgatggcgagcgtggagggcaagangganacggtgctggtcaccggcnccagcngcttcatcggatcgancctcgtnggcctcctcctcgancgcngctacaacgtccacgccagcntcctcaaccccgatgacaanncggananggancacctg

SEQ ID NO: 3725 - DNA, 282 bp, Zea mays
  misc_feature: Incyte ID No: 700453702H1
  unsure 175, 187, 213, 216, 219, 243, 248, 255-256, 260, 262, 266, 275: a, t, c, g, or other
tggacctgcaacagttggaggaattcaagctggtgctttcaagattggtgatactgctggaaccattgacaacataattcagtgcaagctttacaggcctggatctgttggttttgtgtctaaatcgggtggcatgtcaaatgagatgtacagcaccattgccagagtgacaganggtatttatganggaattgcaattggaggggatgtttnccnggnatcaactctgtcaaccaattcggngtttnaaaaccnnccangntaangaggtgttntcggggg

SEQ ID NO: 3726 - DNA, 289 bp, Zea mays
  misc_feature: Incyte ID No: 700453703H1
  unsure 247-248, 262, 265-267, 273, 275, 282-283: a, t, c, g, or other
tgttaccttgcaaaacacatctacgaaggaaaatgaaaccctgatggccattggaactgcttatgttcaaggggaggatgttgctgctagaggacgggtgcttctgttctctttcagtaaaagtgaaaattctcaaaatctggttaccgaagtctactcaaaagagagcaaaggtgctgtatctgctgttgccgctcttcaaggtcatctactgatagcttctggtcctaagatcacactgaataannggcgggcctcgaantgnnnggccgngngattcanngagccc

SEQ ID NO: 3727 - DNA, 296 bp, Zea mays
  misc_feature: Incyte ID No: 700453704H1
  unsure 9, 14, 21, 35, 44, 68, 80, 85, 89, 97, 176, 196, 202, 249, 255, 257,264, 279, 288, 291, 295: a, t, c, g, or other
ctccccccnagcgncgctccngctgtcaccgtcgntcgctccgngtttcatgctccgtgctaagctancgccgtcgtgcntctgncctncagtcgcnatcatgattatctaccgggacctcatcagccacgatgagatgttctccgacatctacaagatccgggagatcgcggacnggttgtgcctggaggtggangggaanatggtcagtaggacagaaggtaacattgatgactctctcattggtgnaaaagncntccgctngaggcccccaagggnaaagttccnaanacanc

SEQ ID NO: 3728 - DNA, 296 bp, Zea mays
  misc_feature: Incyte ID No: 700453705H1
  unsure 109, 122, 228, 236, 242, 251-252, 255, 273, 295: a, t, c, g, or other
gcctgtgttacagtgcgggaggatgtcggagccttccaaggtaatccacatccgcaacgtcgggcacgagattgccgagtctgatctccttcagctgctgcagccgttncggcgtggtctcnaagatcgtcatgttgcgtgccaagaaccaagctcttctgcagatggaagaacatacatgcttccgtgagtgcgctgcaatattacacttccgttcaacctagcatnaggggaangaatgnttacaggcnngtnctaatctccaccaagagntttaccacagaccaaagctgcnt

SEQ ID NO: 3729 - DNA, 136 bp, Zea mays
  misc_feature: Incyte ID No: 700453708H1
  unsure 15: a, t, c, g, or other
ggtaaatcggaggangcccggaagaagtctccttccagcaccacccttctctcctccgcatccccccggccggttcctccctgccgccgcggtcgctgtgcgaagccttgcgaatcaccgttgtccgggctgtggg

SEQ ID NO: 3730 - DNA, 290 bp, Zea mays
  misc_feature: Incyte ID No: 700453711H1
  unsure 19, 28, 44, 50, 52, 64, 70, 102, 184, 242, 272: a, t, c, g, or other
cgtcgaaattgtacgccancaaccatanttctatcatttgcctntatgtncntagcacacctgntgctgnttgacaattatggcttttttatcaactattgnaacatttttggtccagttactttgcagggttgtcttgtcaaagtaaatttctgctcgctgacatgctaatgtttttcttcgngtttggggttcttcacctccctcgcagcaaagaatgtattttttatcgagggatattntgttaatagctagatgaatattactaccantgggaccattagttgggg

SEQ ID NO: 3731 - DNA, 280 bp, Zea mays
  misc_feature: Incyte ID No: 700453712H1
  unsure 50, 182, 195, 213-214, 248, 255, 271, 273: a, t, c, g, or other
gtccgatactgttactgatgatgagttgaaggagatgtttggaaaatatngaaccataacaagtgctgttgttatgcgggatagtgatggaaattctaggtgttttggatttgtcaattttgaaaatgcagatgctgctgctcaggctgttccaagagttgaatggcaagatattcaatganaaggaactgtatnttggaagagcacaaaagnngtctgaaagagagatggagttgaaggagaaattngaaaagnattccaggaggtagcngngaattcc

SEQ ID NO: 3732 - DNA, 291 bp, Zea mays
  misc_feature: Incyte ID No: 700453713H1
  unsure 2, 138, 140, 142, 223, 288: a, t, c, g, or other
angcggccagggcgtacgacgccgaggctcgcaggatacgcgggaagaaagccaaggtcaatttccgggacgaagcggcggcggcaggtgctcagaagccaccagccgcaactactccaactgcttgtgccagcgcanangngctagctcctccacctccaccgccgaagttccgtgctgacgaggttttcgggaacatggacggtggcagcaacgatctgtncgcgatgctggcgttcagtgacagtaaggtgaaggtcgttcgtgtggagccaggtgagggcgccntgt

SEQ ID NO: 3733 - DNA, 294 bp, Zea mays
  misc_feature: Incyte ID No: 700453714H1
  unsure 141, 292: a, t, c, g, or other
gcggctgcttgctcccctcatctctagcctgtacactggttggagtggttgccagtgttctccccacctgctacctgctcgatccactccatcccctttggccatgggtgtgcaagcatacatctacggtaattgcatgantctcctgccttgaagcggaagccttagccttagcctgccgcctgggggaaaccttctgtttcgccgctgccgctgctgtggtataaaggtggaaggctgatccgtcgacggacggagtcccggcggagggaagattgctccgtcgccgcgntt

SEQ ID NO: 3734 - DNA, 162 bp, Zea mays
  misc_feature: Incyte ID No: 700453720H1
aaaacatactagttgtcctgatattatagctttcgtggtgtgtttacgtcactgtatatgaaagggtggggagagagaatgatatgccatgtattctgtcaaatgtttttttataatgtcaagagctctgacttttaattaagaagaaaaaggattatatat

SEQ ID NO: 3735 - DNA, 226 bp, Zea mays
  misc_feature: Incyte ID No: 700453724H1
  unsure 144, 149, 171, 197: a, t, c, g, or other
tggagctccaaaagacctggatgatttttgtgaaaaggcacagctggtgaactatgttcagtacagagcactttggaaggatggacttccttcatgtggacaaagtttacaggtgtcctaatttggaaaacgcagaatccttgnactgncactaaggggccaattctatgntcacctccaagaccaaacggctgggntttatggttgccgttgtgctgctcaaccc

SEQ ID NO: 3736 - DNA, 284 bp, Zea mays
  misc_feature: Incyte ID No: 700453726H1
  unsure 13, 142, 217, 234, 257, 264, 268-270, 275-277, 281, 283: a, t, c, g, or other
ctcaaaccctagncgcctcctgcaagtttcagagctcaggaatctgcgccatggcgagtgagacggagaccttcgcatttcaggctgagatcaaccagctgctctcactcatcatcaacaccttctactccaacaaggaganccttcctccgcgagcttatctccaactcttccgatgcgctggacaagatcaggttcgagagtctcactgacaagngcaagctcgatgcgcanctgagcttttcatccatcttgtnccagacnaggnnncgtannnggtntna

SEQ ID NO: 3737 - DNA, 285 bp, Zea mays
  misc_feature: Incyte ID No: 700453727H1
  unsure 31: a, t, c, g, or other
gtcttctcatacggtgaatggagtggctganttgcatagcaacattttgaagcaagaactatttgcagattatgtctctatatggcctaccaaattccaaaataaaactaatggaatcacgcctcgaagatggctccggttttgtaaccctgagttgagtgaaatagtcacaaaatggctaaagtcagatcagtggacaagtaatcttgatctgctcactggacttcgcaaatttgcagatgatgaaaagcttcatgctgagtgggcagcagccaagttatctgc

SEQ ID NO: 3738 - DNA, 205 bp, Zea mays
  misc_feature: Incyte ID No: 700453728H1
  unsure 89, 150-151, 166, 169, 171: a, t, c, g, or other
accttgccctcaacatcgcggagaaagggttccccatctcggtctacaacaggacgacctccaaggttgatgagaccgtgcagcgtgcncaaggtcgaaggaaacctccccgtgtttggtttccacgaccccgcgtccttcgtgattccnntcaggaagcccggtntcntnatcatgctcgtcaaggctggggcgccggtggacc

SEQ ID NO: 3739 - DNA, 286 bp, Zea mays
  misc_feature: Incyte ID No: 700453729H1
  unsure 37, 129: a, t, c, g, or other
ggcgtactactgtgggagacgcttctctctcctcgtncgggttcgttcctaatcgatcctattggttagggttttgattcgatttggatttggtcgggtttgggcaggccggctctacgcgatggagancgggctgaggataccccagaaggagcgcaccaagaccacgaactccatcctcatctccctcatgaaccagctcgagaaggacaagaaatcgttgactttggggcccgacgacaatcttcattggagggattgcattaaacgtctttgttaaagagat

SEQ ID NO: 3740 - DNA, 288 bp, Zea mays
  misc_feature: Incyte ID No: 700453730H1
attcaaagatgatgacttacttgatcacaggccatacagaaatgacaggagggtacctgaaagacatcgagcactaaaacgatctagtccagctcctgtggttggatatgcatcatctgccaagcgtcgcagaggaggagaggttgagctctccaacatattggaaaaagtagttgatcacttgcggggtttgagtggatcactgctgtttttaaaaccagtgacaaagaaagaagctctgattaccttgatatcatacggtacccaatggatcttggtaccatcagg

SEQ ID NO: 3741 - DNA, 294 bp, Zea mays
  misc_feature: Incyte ID No: 700453731H1
  unsure 82, 96, 160, 170, 201, 234, 236, 247, 279, 287: a, t, c, g, or other
gccttcgcctactcaagctcgaacgcgtcaaggactaccttctcatggaagatgagttcgttgccagccaggagcgcctgcnccccagcgaggatnagacggaggatgaccgtccaaggtcgacgacctccgcggcactcccatgaacgtcggatcgctngaggagatcntcgacgagagccacgccatcgtctcctcgtncgtcggtcccgagtactacgtcgggatactttncntcgttgataangaccagctcgagcctggatgtgccattctggntgcacaanaggtttt

SEQ ID NO: 3742 - DNA, 145 bp, Zea mays
  misc_feature: Incyte ID No: 700453733H1
  unsure 22-23, 62, 67, 78, 84, 117, 122, 141: a, t, c, g, or other
gcaaattgcgcgcaaagcaganncgtgctgaagaggaggctttgcgggagaaacaagaaganaagangcgtgcggagnacccanagttatgccttgaagagcttcgggcccgttatncaganctttctgataaattttagnggtg

SEQ ID NO: 3743 - DNA, 286 bp, Zea mays
  misc_feature: Incyte ID No: 700453734H1
  unsure 28, 196, 206, 213, 228, 231-232, 235, 237, 282: a, t, c, g, or other
ggaggaacttaacctcagacaaaaacanatagtgctatttgaatatgtcatgctttctggagtgaacgacagtatggatgatggccaagaggcttatagagctagtccaagggatcccatgcaagataaacctcatctctttcaatccccacggcggttcccaattcaagcccacaccagacggtaagataattgngttccgcagngttttantgcagggtgggcctnacnnttntngttcggctcaacagaggggatgatcagtggctgcctgcgggcagntagg

SEQ ID NO: 3744 - DNA, 133 bp, Zea mays
  misc_feature: Incyte ID No: 700453735H1
  unsure 26, 36, 61, 73, 77, 80, 84, 91, 95-96, 98, 103, 108: a, t, c, g, or other
aggacagtacaggctcccttctccanttctccttgnttgcgtcttcccggtcccgtctggntgcttgggatcnaacncanaggngcgagcnctcnnancaagncgagnagatggccttcatgggctcccgctc

SEQ ID NO: 3745 - DNA, 278 bp, Zea mays
  misc_feature: Incyte ID No: 700453736H1
  unsure 119, 170, 227, 240, 242-243, 245, 248, 253, 265: a, t, c, g, or other
cagctacctctgttcaggccaaaataaaaagtattcatgatgtgttggacgatccccgttttcttaaaggggaaccggaggatgtacagttgtccaaggagcaagaggagatgaaaaangttactgttcaaactgtcagggatgctttgatctcaaagaaagttgaatcnagggagcaagataatgctccattatctgatgatttcctgaggacgagaatgacgagnttttgataccagntnntngcncaatnccttaaaaaacngggaagctggttt

SEQ ID NO: 3746 - DNA, 202 bp, Zea mays
  misc_feature: Incyte ID No: 700453738H1
  unsure 49, 61-62, 125, 152, 157, 169, 172, 176, 180, 182, 189, 191-192, 195: a, t, c, g, or other
aaaactcgattgattggggccaaattgccctggtatcattaagcctggngagtgtaaaatnngaatcatgccaggttacatccacaaagcctgggcgtattggggatggtatctcgttctggtanccttgacatattaaagcggtgtttcanacaancagtgttaggcnttngggnatcnantgtgtangnnatngtggttg

SEQ ID NO: 3747 - DNA, 165 bp, Zea mays
  misc_feature: Incyte ID No: 700453739H1
  unsure 34, 49, 60, 78, 120, 148, 154, 158-159: a, t, c, g, or other
gctgcacctcccgccgtcgcagaggtcttctggnatccggacccctagntgatggtgcancagctcagggagttcganaccctgaacgacgggctggtggcgctcagggtgcagctgcangagtacgcggagaaatcagcaagagcangggacnccanngccggg

SEQ ID NO: 3748 - DNA, 281 bp, Zea mays
  misc_feature: Incyte ID No: 700453742H1
  unsure 177, 222, 226-227, 230, 237, 249, 267, 273, 278: a, t, c, g, or other
tggcgaggcggcccgcaagaccgagaccatcaccggcaatttctggcagcacttgaaaactggaccaaggcattactgatgcagcaatgagcaggatctcacaggtcaccaaagtcattgcagaaggtggatatgacaaaattttccatcaaacttttgaggtcgcccctggtgaanagctcaagaagccatatgcatgttatctgtcaacctcgggctggncctnntanggggtgngctttacctggnccatggtaaaacgggcanttggangtggnccc

SEQ ID NO: 3749 - DNA, 283 bp, Zea mays
  misc_feature: Incyte ID No: 700453743H1
  unsure 19, 86, 171, 175, 197, 223: a, t, c, g, or other
gcctctaatgatgtctggnaaccaatactccaccagtgttgtcaacaaaatcgagcttccaaatcggcttcatcttacgtatgganacttcacacatccttggcgaaggtttctcagtccctcctcccctggttgataagaaacggcactggaccccgaccatgccctgtntgcnatgtttctgtggatcaggcatntgccttgatgcccctacaagcttcancatcacctgtcgtaaagaattaaactatgtatcagaagatggtggtactgcaaatttatc

SEQ ID NO: 3750 - DNA, 271 bp, Zea mays
  misc_feature: Incyte ID No: 700453744H1
  unsure 31, 52, 225, 250, 254, 257, 263, 268, 270: a, t, c, g, or other
gtccgatactgttactgatgatgagttgaangagatgtttggaaaatatggnaccataacaagtgctgttgttatgcgggatagtgatggaaattctaggtgttttggatttgtcaattttgaaaatgcagatgctgctgctcagggctgttcaagagttgaatggcaagatattcaatgataaggaactgtatgttggaagagcacaaaagaagtctgaaaganagatggagttgaaggagaatttganaagnatntcaggngtaantng

SEQ ID NO: 3751 - DNA, 287 bp, Zea mays
  misc_feature: Incyte ID No: 700453746H1
  unsure 221, 242: a, t, c, g, or other
tggtgcgctatggatacaatgataaagtggaagacccaagagaatttgagggcttagttattgaacatctgaaacaatttatccatcaagaatcattttacagccaaggagataattcaacagaagaagtagaagatgcaaatgagccttccgtcagagttcaaggggcaacattgtccgatagttcttcagatagaagcactgctgctccatcaaatggntgcatctatgagatccaaacnatacaaagagagatggaggatggtgttgtccatatgctaggagaa

SEQ ID NO: 3752 - DNA, 167 bp, Zea mays
  misc_feature: Incyte ID No: 700453747H1
  unsure 10: a, t, c, g, or other
cacggaaganaatcgctacccagccaatcgaagtcttctcttgccctgctttatctcatatcctgttgcgcgagattctggcgattctgctactgatttttatttgtattttgctagttcttgaaatttcttgcacgagtgtcagtagccaactgctgataacaaca

SEQ ID NO: 3753 - DNA, 279 bp, Zea mays
  misc_feature: Incyte ID No: 700453750H1
  unsure 178, 231, 241, 271, 275: a, t, c, g, or other
ccttcgtgtcgcgccctcgacgtgttcgatgaaataccgcagcgagctccaactcgatctgcacagcccctgcgcgacgtcacaaattccgctcgttatcgatgtcgtgcttcgtgcatcgtgtgttcgacgaaaatcccaagtccatggacagcacatgcacaactcaaatccgatnggccaggtacgctagatgattatgtgaattggagggcatggatcaggatggancacaaggtgnctttgatggacccctctcgatatggagggnttgngcaa

SEQ ID NO: 3754 - DNA, 150 bp, Zea mays
  misc_feature: Incyte ID No: 700453751H1
  unsure 115, 118, 121, 129, 138, 147: a, t, c, g, or other
cagcagcttgcaaccttgagtggacaccagggcccagtatggcaagtcgcatgggctcatcccaagtttggttccatgcttgcatcctgcagctacgacggccgggtgatcatcnggnagnaaggaagnaagcctganaaatgggcnctg

SEQ ID NO: 3755 - DNA, 276 bp, Zea mays
  misc_feature: Incyte ID No: 700453757H1
  unsure 197, 210, 220, 224-225, 274: a, t, c, g, or other
agtcatcttgacaggatgttgcaagggtgaaggctacaacattggttttggaacctgcaccgggaaggttctgccggcacttccctgagccaacacgtcttggcatcagttctccggagtctcaacgatctcagctatcagagagttgtctcaacggtctcaactatcaaagagttcatgccgctatctagcaaggntgctatatggctnaacaatatgnggannggttgttttcctgggctgttgaagatgaggagactgatgctctgttgtnaa

SEQ ID NO: 3756 - DNA, 276 bp, Zea mays
  misc_feature: Incyte ID No: 700453759H1
ctgtcagattgaactcggtgcctaacagtctagaggaatggaggtcgctggagtggtgtcgctcagtggtggatttagttagtgctatcattttgctcttgttttcctgttttccggtgggccgtgttaggccaacgctcattgctgttgtatctcctcttttgtaatctctgttttgcttggtgtaatcttcgagccgtttgggctactgtaagggttttgcctcgtttccctaataacgaggttgttgatgtgtggcttgccatgcgaatatga

SEQ ID NO: 3757 - DNA, 279 bp, Zea mays
  misc_feature: Incyte ID No: 700453760H1
acaggacaaacacctcttacgcatgctgttatatgtgagaataaaggggttgctcttctgctaattagacatggtgctgatgttgatgtcgaggacaaggaaggctacactgcccttggccgagcatcgaacagcttcagacctgcactgatcgatgcagccaaggcaatgctcgaaggatgatctggtgctctgctcaaagacgatggaaagtgtggtacgagaaaccgtgctgagtcgaggtgttaaagcttgttctggtgtgtaaacaacggggtc

SEQ ID NO: 3758 - DNA, 280 bp, Zea mays
  misc_feature: Incyte ID No: 700453762H1
  unsure 28, 43, 55, 66, 79, 104, 182, 228, 279: a, t, c, g, or other
ctgtcagattgaactcggtgcctaacantctagaggaatggangtcgctggagtngtgtcgctcantggtggatttatntagtgctatcattttgctcttgttntcctgttttccggtgggccgtgttaggccaacgctcattgctgttgtatctcctcttttgtaatctctgttttgcttngtgtaatcttcgagccgtttgggctactgtaagggttttgcctcgnttccctaataacgaggttgttgatgtgtggctttgccatgcgaatattgant

SEQ ID NO: 3759 - DNA, 283 bp, Zea mays
  misc_feature: Incyte ID No: 700453763H1
  unsure 2: a, t, c, g, or other
cntgatttcatcaaaaggataagagattatcgatcggagtggaagattgaagtgcaccagcctattgctggaaactattatcctgttaatcttggcatctatgtggaggatggcagcaaagagctgtctgtactggtagacaggtcaattggaggttccagtataaaggatggacaaatagagctaatgctacacaggaggctactccatgatgatgggaaaggcgtcgccgaggcgctaaatgaaacagtctgtctcgatagcaatgtgaaggactcatata

SEQ ID NO: 3760 - DNA, 284 bp, Zea mays
  misc_feature: Incyte ID No: 700453764H1
  unsure 3, 6, 10, 116, 157, 197, 226, 248, 262, 268: a, t, c, g, or other
canttnctcnctcctcacaggctcatctcgctttggatcgattggtttcgtaactggtgagggactgagggtctcggagtggattgatttgggattctgttcgaagatttgcggangggggcaatggcgaccgcggggaaggtgatcaattgcaaanctgcggtggcatgggagggccggcaagccactgtcgatcnaggaggtggagtagcgccttccgcaggcnatggaggtgcgcgtcaagatcntcttcacctcgctntgcaanaccgacgtctatctgg

SEQ ID NO: 3761 - DNA, 278 bp, Zea mays
  misc_feature: Incyte ID No: 700453766H1
  unsure 104, 111-112, 127, 130, 133, 139, 148, 151, 163, 165, 172, 187, 189,221, 225, 228, 233, 250, 256, 266, 270, 276: a, t, c, g, or other
ggtgtggtccggacccccctacccgccgggcaccaccagcccgccgcagagactccccaagacggcgtgcagcgccacctctttctccaccgacggtgcccgcntgctcgnnacggtggcatcggcntcngcnaccgtntacgactgncgnacactcgatgtnantcaagtncttcgagctcccggntntcctcgacgcgttgctatcccccatggggtcntatntanagatnttgccagaagtcatccncgccgnagaataagantgtngtgttnac

SEQ ID NO: 3762 - DNA, 279 bp, Zea mays
  misc_feature: Incyte ID No: 700453768H1
  unsure 3, 37, 54, 238, 242, 247, 249, 263: a, t, c, g, or other
gtncaggcaagtaccatgacgtgcctgctgtgatctnttccctgacaggctacnctggaaatctgttccacgacttcactgacgtgatggtccctcttttcacgacagcaagcgagttcaacgggagaagtccagttccttataacggacatggcgctctggtggacaatcaagtaccataccgttcttgagaaactgtccaagtaccctgtggatcgatttcagcaaggacggcgangtgnactgntncaaggatgtcatgntcgggctgattgttaa

SEQ ID NO: 3763 - DNA, 240 bp, Zea mays
  misc_feature: Incyte ID No: 700453770H1
  unsure 18, 22, 32-33, 42, 53, 77, 191-192, 205, 210, 213, 216, 218, 220-221,226: a, t, c, g, or other
gtacactggtgctgtgtnccancgtttgttannaatgggtanatgacttaagnaagaagatcatggaatgggttaangagtgatgctgaacttgttaagtcttttggtatatttgtacggctctccaatgatattgtatcaaccaagcgtgaacaaagagagaagcattgtgtctccactgttcagtggtnncatgaaaggggcnggagntanccntngnntgagncctgtgtccagtaa

SEQ ID NO: 3764 - DNA, 136 bp, Zea mays
  misc_feature: Incyte ID No: 700453771H1
  unsure 4, 6, 25, 30, 45, 57, 59, 61, 79, 82, 96-97, 122, 125, 131, 134: a, t, c, g, or other
ctcnanccgcttcgcaacggttgcngcggnttcggacagggctcncgcgacgcgatncngnactggcggcatctctgcnggnctcgtacctccctnngctcgcgcctcctctcgttctcctnggngtgttntcngt

SEQ ID NO: 3765 - DNA, 136 bp, Zea mays
  misc_feature: Incyte ID No: 700453775H1
  unsure 8, 34, 48, 60, 62-63, 66, 73, 75, 78, 82, 93-94, 132, 135: a, t, c, g, or other
cgctatgncgtacaccggatatcctctagcgccntcccacaatcgggnttctgaggttcngnngangtcgtcngngcngacnaccccctcganngcgtacctcgctgctgtgccctctccatgtctgatatnaang

SEQ ID NO: 3766 - DNA, 146 bp, Zea mays
  misc_feature: Incyte ID No: 700453776H1
  unsure 30, 33, 55, 135, 140, 142: a, t, c, g, or other
gcactaggcccttattctcaggccatgcanagncaaataatgcttgtgtttgttnctggagtttcttggcttgaatcccgaagaaccaggaagtttatgctcctggaaaatgttgaggagcaaactgagtcaggntatgngnaaca

SEQ ID NO: 3767 - DNA, 277 bp, Zea mays
  misc_feature: Incyte ID No: 700453777H1
  unsure 21, 26, 44, 68, 82, 115, 147, 158, 202, 271: a, t, c, g, or other
ctggagaatgagctgaagaanaagantgggcagcttgacaggantaatgcaacagttcagaggctggnaatggagaatgcanagatacgtgctgagatggaagctgcaaaactgngtgcatcagagactgaaaaacaatgccagggnctcttaagganagagaagaaggatagcaaaaggctgaagtctgggagcgccaganagcgaactgaaggaggacattgctgaatgcaagacaaatattacacaagctgaaagggagcttgctgangttaca

SEQ ID NO: 3768 - DNA, 282 bp, Zea mays
  misc_feature: Incyte ID No: 700453778H1
  unsure 12, 20, 25, 91, 94, 139, 146, 183, 215, 220, 230, 276: a, t, c, g, or other
tttcagcaatgnaccatgancgagnacatctgatctgaagattgtggccgaaaattttgaacaaaacctagagattacaggcacatccttngangctacgtaagctggtcgttgaaatctgtgacattgtggcgacaanagcagcncggctggctgctgcggggcttgcagggatcctcatgnagatcgggagagatcacagcttcgaggaccancggtnagtcatcgcnatcgacggaggactgtttcgagcactacaccaaattccgccggtgnttggaa

SEQ ID NO: 3769 - DNA, 118 bp, Zea mays
  misc_feature: Incyte ID No: 700453779H1
  unsure 16, 84, 113: a, t, c, g, or other
taatttaaataatgcncctgcataacttctgtgatccctacagcaatgtgcaaggcgtccttctagtgcttagagaatttgcanccagtctcaacgaatcttttaggattcanacatt

SEQ ID NO: 3770 - DNA, 133 bp, Zea mays
  misc_feature: Incyte ID No: 700453781H1
  unsure 2, 28, 59-60, 110, 117: a, t, c, g, or other
gnaaaacagacacacgtcactgttcgcnttgtccggtcgtttctgctccattcctcctnntgcaagctgcaaaggaatcaggcggagtggcgcgatgggagagcaggtcntgacggngcagatccagcggaag

SEQ ID NO: 3771 - DNA, 272 bp, Zea mays
  misc_feature: Incyte ID No: 700453782H1
  unsure 52, 56, 62, 72, 122, 227, 229, 237, 247, 249, 255, 260, 267, 269: a, t, c, g, or other
agtgacggacgactgaaccaccgacagacaacatggccgcctccgcctccancgtntccggnctcgccggcncctccctggccagccgcccggcgttctccaccagcttcacgcgggggcanccgggtgtcggcgaggaaccccctgatgagcaggaacctggagaggaatggcaggatcacctgcatgacgtttccccgggactggctatccgagggacctgagcntnatcggttngggttcagcngntagatngggcntccagcngnccg

SEQ ID NO: 3772 - DNA, 113 bp, Zea mays
  misc_feature: Incyte ID No: 700453783H1
  unsure 2, 24, 28, 41-42, 60, 79: a, t, c, g, or other
gngaacatcccgcccaaggccganctgngcgacctaccganncctcgcggcggggctgcnccggccagaacggctctgncatgatcgacggctccgagagcttcgacggcgcc

SEQ ID NO: 3773 - DNA, 272 bp, Zea mays
  misc_feature: Incyte ID No: 700453784H1
  unsure 19, 24, 31, 70, 120, 145-146, 189, 206, 212, 225, 234, 251, 255, 260,263, 268: a, t, c, g, or other
gccacaccggaggctaggncggcnggcgaancaagccgtggcgccgagtgccgcggcttggcggccgagnaccccataaggagagtcatgttcttggctccctggggtcacacataagancacaaaccgaccgaccgagatctgnncatgcaagcgagcatggccatgtcttggtcagtcagatctgcnaacaaccgaactataantaaganctggaggcctgtnttgtaaatnatggagcttgctgttgnttgnacccntgnaaaantgac

SEQ ID NO: 3774 - DNA, 267 bp, Zea mays
  misc_feature: Incyte ID No: 700453785H1
  unsure 152, 164, 171, 186, 203, 219-220, 230, 238, 243, 246, 248, 251, 254, 258: a, t, c, g, or other
cagactctggagataagcagaggggttcaaaaaagccaccaggtgggggagagaacgagggaaatttccagcatccacgaagacggcaggctttcccgccttcaggcaatagaaatgctacgtatcaccagtagcaagttgagatgtataantggcgatttggnttattcnaaagttgtgataaangagtacccgagttttgnatatttggactggggnnttctcgggcnatgagaanccacnganantgntantgcncggggtgcc

SEQ ID NO: 3775 - DNA, 272 bp, Zea mays
  misc_feature: Incyte ID No: 700453788H1
  unsure 19, 40, 64, 133, 159, 164-165, 224, 227, 239, 242, 248, 265: a, t, c, g, or other
gaactacagttccagtacnccaaagtgtactccagaaatnaacaagagatgttttggctgctcntgttcgccataacattgatttaatctacttgaagaaatctttggttgtggatctactaagggagccggntacatttggcagcaaagttattggcngtttnntgagaataaagattgatctcaacgattatagtttctacatgcataaaaaggtgcaccancanagaaagttgtancancttggnctagttgccaggcaccntccctcc

SEQ ID NO: 3776 - DNA, 273 bp, Zea mays
  misc_feature: Incyte ID No: 700453789H1
  unsure 202, 219, 225, 230, 233, 242, 246, 252, 266, 269: a, t, c, g, or other
gatcaatattgtcatggagcataagcttgtgtatattagatccatcagaatttttggagaaatatcaaattgcctctttcttggatgcacctttcattcagtcacagtctcattagacttcctgagcaaatgaagcatacgattgcccttcggcatctgtacacagatgggtgcacgaggttggagtgcatgcctccagagnttggaccaattcacctnggtcgnaaganttncatgggggnaagntatggnaggccagccagtcntgntggt

SEQ ID NO: 3777 - DNA, 270 bp, Zea mays
  misc_feature: Incyte ID No: 700453790H1
  unsure 238, 246, 250, 253-254, 260-262, 266-267: a, t, c, g, or other
ggatccaaccccaacaaacttccaggcgacggactgaggatgagtgaagaggataaggctgctgcttctgctgagcagcctaagagggcccctaagctcaatgaaaggatcctctcctctctgtccaggaggtccgtagctgctcatccatggcatgatctcgagatcggtcctggtgctcctgctgtattcaatgttgttgttgagatcacaaagggaagcaagtccaatacggagnttgacaanaaanggnnctgttnnnggtnngcc

SEQ ID NO: 3778 - DNA, 273 bp, Zea mays
  misc_feature: Incyte ID No: 700453791H1
  unsure 2: a, t, c, g, or other
gnaaggaccaatcatacaaaagagcactgctttttgttgataactcaggtgctgatgtggtccttggaatgcttcctttagctagggagcttttacgccatggaacagaggtagttcttgttgcaaattcgttgccggctttgaatgatgttaccgctaatgaacttccagaagttatagctgaagcctcaaagcactgtggtatccttcggaaagctgcagaagctggtggatgatagtcgatgcaatggctggcatccaagatgatctcaa

SEQ ID NO: 3779 - DNA, 275 bp, Zea mays
  misc_feature: Incyte ID No: 700453792H1
  unsure 5, 13, 20, 79, 109, 145-146, 158, 170, 182, 197, 205, 240-241, 273: a, t, c, g, or other
ctctncccccgcntcctggnctgccaccccaccccagcgtttaccccaaagcacaattccctggtcacttggtcaagcngctgggcctgacggaggccgaggggcagancggggctccagccagacccctgaaaggaagcaggtnntcccccacttcnaggccttagttngggtgggggggncagctcctgggcctngggtcttntcacccccacccccttgtcctgggtaggcccctgnntgcgcctctctgccttttcctcgggtgtcctnct

SEQ ID NO: 3780 - DNA, 274 bp, Zea mays
  misc_feature: Incyte ID No: 700453793H1
  unsure 249: a, t, c, g, or other
gttttttcaagtggctgaagcctgggggcaaggtccttatcagtgactactgcaggagtcctgggaaaccatcagaggaatttgcagcgtacattaagcagagaggttatgacctatcatgctgtggaggcttatggacagatgttgaagagtgctggttttcgtgatgtcattgctgaggatcgaactgatcagttccttggtgttttagataaggagttagctgaatttgaaaagaacaaggacganttcctgtctgacttcacccagggga

SEQ ID NO: 3781 - DNA, 251 bp, Zea mays
  misc_feature: Incyte ID No: 700453803H1
  unsure 199, 201, 207, 213, 216, 227: a, t, c, g, or other
agggaacccaggccctgcctaccaaggtggtaacactggttatcaaggtggcaacccaccacctccctaccaaggaagcaacccaccacctccctaccagggaagcaacccaccacctccttaccagggaggcagcccaccagggccaccacctccctaccgaggaggcagcccaccagggcaacaacttccttaccgngngggaancccaangtncggctttttcnggtggggaaattggggaaaccggg

SEQ ID NO: 3782 - DNA, 254 bp, Zea mays
  misc_feature: Incyte ID No: 700453804H1
  unsure 15, 137, 187, 199-200, 211, 213, 215, 222, 225-226, 233, 244, 248-249: a, t, c, g, or other
aacgcatcgcgacgnactccccaaccccaacaagtctctcggccaggtctccctctccccggctctccgccttcctcttccagtccccgcgcgcgagatcgccgccccgtgtgggccctagatcccgatggcctcgngccgccgcaccctgctcaaggtcatcatcctcggcgatattggggttggnaaaacttcctgnntgaccaatttngnanaaaaaanttnnaaaattntttaaaggttnaagnnggggg

SEQ ID NO: 3783 - DNA, 246 bp, Zea mays
  misc_feature: Incyte ID No: 700453805H1
  unsure 211, 218, 220, 229, 234, 244-245: a, t, c, g, or other
cgctccactaatgtgctactggaaagaaggtggagccttggagtggctattgaaaaattcctcggtcgcgaaaccaatgaaagttctgcaattgaaagatgtgaaaacaaggctgattccaaccttcctatactggaacgggaatatatgcaaggtgttctcatcagcgaggtcgtggtggatgcaagcttctcgatccattaaaaggggntaccccncnaaagaaaangtgangggcataagnnc

SEQ ID NO: 3784 - DNA, 248 bp, Zea mays
  misc_feature: Incyte ID No: 700453806H1
  unsure 169, 183, 194, 205, 208, 224, 228, 231, 233, 243, 246: a, t, c, g, or other
gttgactattctctacaaaccacaaagacattggaacactatacctattattcggcgcatgagctggagtcctaggcacagctctaagcctccttattcgagccgagctgggccagccaggcaaccttctaggtaacgaccacatctacaacgttatcgtcacaggccnatgccatttggtantaatctgcttntagtaataccntcnatatcggggctttggnaacnganantcccccaaanaangg

SEQ ID NO: 3785 - DNA, 252 bp, Zea mays
  misc_feature: Incyte ID No: 700453807H1
  unsure 188, 201, 220, 235: a, t, c, g, or other
tatctctcagccgaaaggttgaggagtcagagaagttgagtgatatgaaagttgctgctgctatggctcaagtggaagccatcagagccagtgagaatgaggcaatcaagaaactagaaactgcccgcaaggaaatggaggacatggaattggcaacagaagaggccctaaagagggcagagatgggntgaggcagccaanaaggcttagaaggtgaacncaaagaattggcccnaaaagggaaagaaaccc

SEQ ID NO: 3786 - DNA, 182 bp, Zea mays
  misc_feature: Incyte ID No: 700453808H1
  unsure 25, 42-43, 65, 97, 103, 111, 125, 138, 141, 146-147, 151-152, 155, 164,174, 177: a, t, c, g, or other
ggaaagcagagagtttctgaggaanctctgcatagggaaggnngtcacattcaaagtggattatncagctcctaatattggacgagaatttggaacngttttnctatgtgntaagaatgttggcntactcagtagttncgnctggnngggnnaanggtaaaggntcgggccccnaanggtgg

SEQ ID NO: 3787 - DNA, 239 bp, Zea mays
  misc_feature: Incyte ID No: 700453809H1
  unsure 74, 172, 197, 204, 212, 222, 226, 228-229, 235-236: a, t, c, g, or other
atcgactgctaagagagtcgtcccagactatcccgccgggtagctaaccttatcttcccatggagccagcgaantcgcagctttccttgccgtcgctgccgtcgcctacgctgttgccgtcgcaccggctgccgcggaatactccggcggcgcgaccgccccagaaagtgcnagacgcaaatcatgtacttcacaantgcttgnccgtgatnaatcgggggnagtntnnggttgnnaaa

SEQ ID NO: 3788 - DNA, 231 bp, Zea mays
  misc_feature: Incyte ID No: 700453810H1
  unsure 169, 190, 198, 202, 205, 213-214, 217, 222: a, t, c, g, or other
tccgtgtttggttgaataataaattgacgaaagagggccaagtatagcttagagagagaagctagctagctgaaatggaggctagcagccgccgccgcgtctctcttgtgccactgctggtggtgatcatcgggtgctgtgcctgccgcgcccagatcccgtcccggcnaggacggacggtttcgtatanggcgggancccncgntttggggnnaangtttngtaaaaact

SEQ ID NO: 3789 - DNA, 288 bp, Zea mays
  misc_feature: Incyte ID No: 700453812H1
  unsure 187, 210, 222, 225, 240, 242, 245, 269-270, 285-286: a, t, c, g, or other
cgaaaccctcgccagtccccaactcgaacctcagtcaggcagcgtgaggagggagagttcaaggaccgaggcggcgtcgggcgagatgaagcttaacgtcaagaccctcaagggcaccaacttcgagatcgaggcgagccccgatgcatcggttgctgatgtgaagaggatcattgagaccactcanggtcagagtactaaccggggggnaccaacaattgntcntttccgaggggaaantnccnagggttaaacccttttgggaaaannaggggtttttaaaanntt

SEQ ID NO: 3790 - DNA, 283 bp, Zea mays
  misc_feature: Incyte ID No: 700453813H1
  unsure 19, 171, 231, 235, 245, 248, 251, 253, 261-262: a, t, c, g, or other
gctgcccctcccgccgtcncagaggtcttctgggatccggacccctacctgatggtgcagcagcttcagggagttcgagaccctgaacgacgggctggtggcgctcagggtgcagctgcaggagtacgcggaggaaatcagcaagagcaaggacaccaacgccgggatggnctggctcctcgctctcccggccagcgtcagggagtcgtcatcagggcaagggagtcatcnagtntttccttgtnatntcnantgggcggnncgccttaaattttcggaattt

SEQ ID NO: 3791 - DNA, 290 bp, Zea mays
  misc_feature: Incyte ID No: 700453814H1
  unsure 204, 222, 224, 226, 228, 230, 234, 242, 268, 271, 275, 277, 286: a, t, c, g, or other
tggcgaggcggcccgcaagaccgagaccatcaccggcaatttctggcagcacttgaaaactggaccaagcattactgatgcagcaatgagcaggatctcacaggtcaccaaagtcattgcagaaggtggatatgacaaaattttccatcaaacttttgaggtcgcccctggtgaaaagctcaaggaagccatatgcatgtaatngtcaaacctcggctgggncntntnangggngggtttanctgggccaatggaaaatgggctttgnggngggnanccccctttnccac

SEQ ID NO: 3792 - DNA, 189 bp, Zea mays
  misc_feature: Incyte ID No: 700453815H1
  unsure 59, 87: a, t, c, g, or other
ggaagaccatgtaaagttgtttgcaatcctgacagagaagcgactttacacccaaagantattgacccagatagacgggaaaactgnaacttgaggtgtacaaaatcacatcattggttgcataggaagacaattgcagatgttgtggagtcactcttggagtttttattgttgagtggcggattcaaa

SEQ ID NO: 3793 - DNA, 197 bp, Zea mays
  misc_feature: Incyte ID No: 700453817H1
  unsure 143, 153, 162, 180, 182, 187-188, 192, 194: a, t, c, g, or other
agaagatatgacttgtgggatagatcacaaaccacatgtacattttcctgtcagtataaaaaggtttctctatgcctgtcacaatctctggctgaggaccgaggaaatacccactaaacttgccacagcaaaggcgcctcctncaggtgattntcaacaagnaggtttatcccggtggtncntggannagangngct

SEQ ID NO: 3794 - DNA, 194 bp, Zea mays
  misc_feature: Incyte ID No: 700453821H1
  unsure 3, 106, 132, 136, 141, 158, 162, 173, 183: a, t, c, g, or other
ccngacccagcagctattgtggtcgtccctcagccgcgtcgcaccgcatcgcattctacgattcgaagctctcttctggcttcgcagccatgggcgaagaattacncaaccgtgagcgccgagtacagcgangccntcganaaggccaggcgcaagtnccgngccctcatcgncgatgagagnttgcgggcccc

SEQ ID NO: 3795 - DNA, 191 bp, Zea mays
  misc_feature: Incyte ID No: 700453822H1
  unsure 37, 39, 52, 58, 78, 83-84, 86, 142, 161, 171, 174-175, 179, 187: a, t, c, g, or other
gcgggagtactacgactaccgcaagtctatctacggngncgtcacgcaccgngccctnctcgtcgacgccgtcggcanccctnntngtcacccgcccagctccaccgctcaggtgtataagagcattggtgagaggtatggngtgaagtactcagaagacnatatcctganaanntacnggcgggcntatg

SEQ ID NO: 3796 - DNA, 176 bp, Zea mays
  misc_feature: Incyte ID No: 700453824H1
  unsure 57, 61, 69, 71, 126, 134, 139, 151, 155, 158: a, t, c, g, or other
gagcatcactggaattatatcgaaaactatttcaaagaagggtatgcttgaagtgtntaantccttgancngaagaaggaaagaagcagtttattgaggcctatagtgcagcatattacccatgcntggacgtnttgtntgagtgctatgnagangtnccttgctggagtgagtta

SEQ ID NO: 3797 - DNA, 230 bp, Zea mays
  misc_feature: Incyte ID No: 700453825H1
  unsure 188, 191, 213, 218-219, 224, 228: a, t, c, g, or other
gtccgtgtttggttgaataataaattgacgaaagagggccaagtatagcttagagagagaagctagctagctgaaatggaggctagcagccgccgccgcgtctctcttgtgccactgctggtggtgatcatcgggtgctgtgcctgccgcgcccagatcccgatcccggcgaggacggacgggttctntanggcggaaaaccgcgctttgggncaaannggtgntttnaa

SEQ ID NO: 3798 - DNA, 228 bp, Zea mays
  misc_feature: Incyte ID No: 700453826H1
  unsure 55-56, 123, 134-135, 175, 188, 190, 192, 195, 198, 200, 204, 208, 214,219: a, t, c, g, or other
caaatccccctgtcccgctaggattcccccgaaaccctcccccaaaaccccagannagagaagagcgcaagatgttcggcttcgggcaccacggccaccacggccagaacccgccggcgcacngcgtcgtgcannagcccaccttcaagatcttctgcagggccgacgagggttnctgctcaccgtcngngngtnaangngggntagncccggnaaccngggaaagaa

SEQ ID NO: 3799 - DNA, 278 bp, Zea mays
  misc_feature: Incyte ID No: 700453827H1
  unsure 216, 223, 226, 229, 237, 240, 242, 250, 254, 266-267, 270, 272-273, 275,277: a, t, c, g, or other
caatttcttgctcagaagactccatcctgctgtgtatctctctcatcgttttataatgacacaattgtgaactgcccaacatgctcatgtggctgccagaacccaagtgggtcaaactgtgtgaatgaggattcacctaatctacaagctgcaattgatggtcctggcaaatggactggtcagccccttgtacatgcattcccaaatgtggccggntaagatncanggnatgggagnccnantaaagggnttcngggggggaaaannccntnncnant

SEQ ID NO: 3800 - DNA, 282 bp, Zea mays
  misc_feature: Incyte ID No: 700453829H1
  unsure 245, 259-260, 263, 281: a, t, c, g, or other
agaaaatccactcaaggtcccgggcaaggagggcccatgaggccaagcagaaggggaggcactctggttacggtaagcgcaggggtaccagggaggctaggctccccaccaagatcctttggatgcgcaggatgcgtgtcctcaggcgtctgctgcgcaagtatcgtgaagcaaagaaaatcgacaaccacatgtaccacgatatgtatatgaaagtaaaaggaacttgtttaaaaatagggggntactctgggggggnntcncaaagttaaggggcgggng

SEQ ID NO: 3801 - DNA, 286 bp, Zea mays
  misc_feature: Incyte ID No: 700453830H1
  unsure 12, 113, 223, 238, 257, 259, 261, 283: a, t, c, g, or other
cttgaggcgaangtaggtgagccaaactgccaaagcccatcgggcaaccactagcaattcaactgctttcgcttcatcgctccatggctcaattcaatgcggtttcgtatttnttgctgcgaagtgcgaaggaccaactctttcgaagggaaattatatctcaggtgcttaggagtctgccatggccagcgagaataaggtattttaggttccaggaagtcgnccaaggcagaacgtnacccaagggatttggaaanancngcggggaagggtttaaggcccncct

SEQ ID NO: 3802 - DNA, 152 bp, Zea mays
  misc_feature: Incyte ID No: 700453834H1
  unsure 62, 114: a, t, c, g, or other
gtcggcagctcgccgcgcttcagggtctacgacgtcgacttcggcttcggacggcccgagcncgtccgcagcggcgggaacaacaagttcgacggcatggtgtacctgtacccnggccgcggcggtgacggcggcatcgatgtcgagctggc

SEQ ID NO: 3803 - DNA, 185 bp, Zea mays
  misc_feature: Incyte ID No: 700453835H1
  unsure 19, 40, 42, 100, 136: a, t, c, g, or other
aatttcttgctcagaagantccatcctgctgtgtatctcncncatcgttttataatgacacaattgtgaactgcccaacatgctcatgtggctgccagancccaagtgggtcaaactgtgtgaatgaggattcacntaatctacaagctgcaattgatggtcctggcaaatggactggtcacccc

SEQ ID NO: 3804 - DNA, 187 bp, Zea mays
  misc_feature: Incyte ID No: 700453836H1
  unsure 107: a, t, c, g, or other
aaaaccccaagttttgtgtatcattgctgaaatttaggattaagaaatggccctgcatttctgggaagcttgctagaggttttggctgcatgtggcaacaaaatatntgtcaccgattgcaatggcaccagatatcgtgtagccatataagtgtgggagcattgtacccagaaagaaaaaaaagggg

SEQ ID NO: 3805 - DNA, 291 bp, Zea mays
  misc_feature: Incyte ID No: 700453839H1
  unsure 22, 75, 88-89, 109, 124, 128, 141, 165, 177, 180, 186, 201, 215, 220,228, 235, 239, 243, 250-251, 261, 269, 285, 289: a, t, c, g, or other
agcatcactggaattatatctnaaactatttcaaagaagggtatgcttgaagtgtataactccttgactggaganggaaagaagcagnntattgaggcctatagtgcancatattacccatgcntggncatattgtatgantgctatgaagacgtctcttctggnagtgagattagnaantgtggngttggctggggaggnaattttttgaacanggaanggcctccnctggttncccnaagnggaaaanntggtcaaacnccgttttngtgaaagggggtaaanggancc

SEQ ID NO: 3806 - DNA, 183 bp, Zea mays
  misc_feature: Incyte ID No: 700453840H1
  unsure 23, 66, 70, 108, 124, 127, 132, 157, 161, 166, 181-182: a, t, c, g, or other
cgcctggatcgagcagctgagcnactaagcgaagactcccttttccccgagcacaagagaaccatngcgncggcggcagtttacggcggcttcaaaggtaagcttggngtcggggatgcccccnagntgcanctcaaccgcatccgatcacactctnagcnaaaancgtcaagaacttganna

SEQ ID NO: 3807 - DNA, 169 bp, Zea mays
  misc_feature: Incyte ID No: 700453842H1
  unsure 133, 152, 163, 166: a, t, c, g, or other
aaatctccagtcgattatcaaggagcaagagatgtaaagccaatcgtagagtttgctctgtcacaggtcaaggcccttcttagagataggttgagtggtaaggcatcagcagggtcaaatggcaagacatctngaggttcaagtgagaaaantgaaccaagtnctnagt

SEQ ID NO: 3808 - DNA, 286 bp, Zea mays
  misc_feature: Incyte ID No: 700453844H1
  unsure 195-196, 203, 206, 210, 214, 223, 226-227, 253-254, 258-259, 268, 274,277: a, t, c, g, or other
aacagacagtgatcctcctatttatacttctactcctgtagaagaacctaccagaacctatttgctgtatgtgggctccagcccttctcatttggaaccggcatgggaggatatgaactcctggtaccaagtacagaggcagacaaaagtactgactgtgatgaagcaaagatggcatttcctagcagatatatnnccacggntgntaantttngggaagggntcnncaatccggggcccatttaaagaagcnnaccnnaagggggantgtggnccnccgtgtggt

SEQ ID NO: 3809 - DNA, 283 bp, Zea mays
  misc_feature: Incyte ID No: 700453845H1
  unsure 188, 205, 211, 221, 226, 246-247, 249-250, 252, 258, 261, 263, 266-267: a, t, c, g, or other
gcaaccatgacaccagtttccgttctgccaaccttttctgtaccacctgctgtgccaccctatggcgtgctgtctgcacctgggtttcctatgccaccattaccgcccggaccaccacctgtcccactgcagatgggttcatcatcatcacaagttggtggccctcaaccatttgtctctggactttngagtaacttatgcggcntggtgnaaatttcacnggaanccacttagccatcccagggnntnngnttgggngtngnatnnaattgaacccccaagg

SEQ ID NO: 3810 - DNA, 283 bp, Zea mays
  misc_feature: Incyte ID No: 700453846H1
  unsure 68, 190, 218, 221, 227-228, 231-232, 234, 238-239, 248, 250, 254, 264,275-276, 282: a, t, c, g, or other
attcctcctccggatttcgcagtcagcggtggtgaaggtagcgggcgcggaggaagatggggctcgcnttcgggaagctcttcagccggctcttcgccaagaaggagatgcggattcttatggtcggtctcgacgccgccggtaaaaccaccatcctctacaagctcaagctcggcgagatcgtcacaanccatccccaccatcggtttcaatgtggnaantgttgnntannanaacnnttagcttcnanggtntgggattttngggggtcaggnnaaaatna

SEQ ID NO: 3811 - DNA, 283 bp, Zea mays
  misc_feature: Incyte ID No: 700453848H1
  unsure 30, 87, 194, 201, 204, 206, 210, 214, 236, 238, 246, 250, 257, 264-266,272, 278, 280: a, t, c, g, or other
caaaaccagaccaccaaacaagtgccagcnccctctcgcagttcgccgcaatggagagcaccttcatcatgatcaagcctgatggcntccagaggggcctcattggtgagatcatcagccgttttgagaagaagggcttctacctcaaggccttgaagcttgtcaacgtggagaggtcgtttgccgagaagcantaggccnatntnggcntccnaagccctttttcagggcctcgngnaaaaaatnttcngggcccntgggggnnnattttngggggngnaaa

SEQ ID NO: 3812 - DNA, 183 bp, Zea mays
  misc_feature: Incyte ID No: 700453851H1
  unsure 34, 121, 128, 134, 138, 143, 166, 168, 174, 182: a, t, c, g, or other
aaaattgggagtatcattggcaggggtggagaanttggcaaagcagttgaggactgagacccaagctaagatcaggattggcgagagtgtccctggatgttatgagcgatttgttaccatntttagcncgagcngganaactnataccatcgatggtgctgaagangnggttgnccccgccnc

SEQ ID NO: 3813 - DNA, 148 bp, Zea mays
  misc_feature: Incyte ID No: 700453853H1
  unsure 48, 50-51, 61-62, 70, 93, 98, 116, 137, 142-143: a, t, c, g, or other
gcgaacgccggttttgttgacgcgtccaatgccgcatgtgacgacaananngagctatcgnntggagctnaacgggttcgccgacatgagccnacgangagttcatggccatgtanactggcttgagaccagtcccnggagnngcaaa

SEQ ID NO: 3814 - DNA, 150 bp, Zea mays
  misc_feature: Incyte ID No: 700453854H1
  unsure 9, 25, 95, 97, 101, 119: a, t, c, g, or other
cgaaccggnatggtcggaggcggangcggagatgaggaagaagctcggcacccggtttccccgcggcttcgaatcaaaaagataatgcaagcagngnaggntgttggaaagattgcatnaggcgtgcctgttttagtctcgagggctctt

SEQ ID NO: 3815 - DNA, 147 bp, Zea mays
  misc_feature: Incyte ID No: 700453856H1
  unsure 108, 110, 125: a, t, c, g, or other
gacgaacccttcttctgtgatgatggaatccaacctgttccccacattccaaggcatccttacggagttatgttgctagatggctaatgcaacggtatgcatcttacntngcaacgagaggctcnccttaaggctatccaattggga

SEQ ID NO: 3816 - DNA, 218 bp, Zea mays
  misc_feature: Incyte ID No: 700453857H1
  unsure 136, 156, 159, 162, 172, 177, 187, 189, 206, 215-217: a, t, c, g, or other
gcttctccctcctcctcgctcgctcgatcgctcccacgtcctcgcctccctccacaaaccaccaccaccatccaggatcgcagcgcggcgcgcgagagaggggtgagcaggtcgggcaagatgagggagatcctgnacatccagggcggccattgnggnaancatatcggcngcaangttctggganangacctgggggcgagaantgcgtagannnc

SEQ ID NO: 3817 - DNA, 179 bp, Zea mays
  misc_feature: Incyte ID No: 700453859H1
  unsure 35, 171, 175: a, t, c, g, or other
ctgccgtgtacgctcgattcgggcgagagttaatncgtgaagaaagccacgatggagagtggccgaacctttcggacagccgcgcgtgtcgttagttgatttcgagctgcctctgcttctgcttgcttgctgcttacttcggggcagcagccgtcccggcgatggactggncctncgcg

SEQ ID NO: 3818 - DNA, 152 bp, Zea mays
  misc_feature: Incyte ID No: 700453860H1
  unsure 18, 32, 44, 47, 63, 71, 86, 118, 137: a, t, c, g, or other
gcggcagcattcaccgtncaaggtcaacgacnccaccgtggccnctngccgatcgcttcattngttatgtncaccctccggtgtgncagaaggaggagattgtagcagaggacatgtnttgtgatggctgcagatgngaaattgctttctgc

SEQ ID NO: 3819 - DNA, 276 bp, Zea mays
  misc_feature: Incyte ID No: 700453861H1
  unsure 211, 231, 239, 241, 247, 260, 263: a, t, c, g, or other
gaaatttatgacagtgtagatccagaggttgtactgcatatccttgttcataaggttattttagaatgcgtggataagggggttagagaaggcaggcatcaagttcatgcttggctatccctccttgcagcccggtataatcaggtcctgagttctgatgtgcgaactccactatcgagcatagacattgacttctcgcagtgcccgcagnttcaaacgatacctcaactngtttttgncntggtgnagaagtcctcttnttngttgcaagaaaaa

SEQ ID NO: 3820 - DNA, 180 bp, Zea mays
  misc_feature: Incyte ID No: 700453862H1
  unsure 17, 37, 64, 83, 164, 169, 172: a, t, c, g, or other
gcccgcagtcgcttgcncgcagagcacttcgcaccgncgccccatcccatcgccgccagtgtcngctcgatccgatggctccnacgaagaagtcgaagaagagcacagagagcatcaacaacaagctgcagctggtgatgaagagcggcaagtacaccctgggntacangancgtcctca

SEQ ID NO: 3821 - DNA, 178 bp, Zea mays
  misc_feature: Incyte ID No: 700453864H1
  unsure 5, 13, 20, 46, 64, 85, 102, 131, 167, 172, 175: a, t, c, g, or other
agaancaatcaancagcaanactcttctcgtataacataatacagngaaggtaactcacatggnaacttccatgggttgtctcgncttgctctgccttgttncttctctccttcccagtgccgtccttggncacccatggggtggcttgttcccacagttccatgancattngtnccc

SEQ ID NO: 3822 - DNA, 141 bp, Zea mays
  misc_feature: Incyte ID No: 700453868H1
  unsure 52, 74, 76, 82, 85, 99, 136: a, t, c, g, or other
atcttccgcgagtggcgtctggcgctgcaagaattggctgggcctcggcaangagaccacgctggcgcgcagtncntgccangtngaccgctacctctncggccgtcatcaagggcgcgcaatttcgatttctccnccctt

SEQ ID NO: 3823 - DNA, 182 bp, Zea mays
  misc_feature: Incyte ID No: 700453870H1
  unsure 92, 97, 127, 129, 156, 165, 171, 175: a, t, c, g, or other
ctctcggcggcccgttggtcacgtgactcatcccccctgtgctctcctctgcgtggccttgtttcctggcggcgactgctggtcgagcggcnccgcncttagctaggtcttcgctgggttcttcgcngncgacgaacgtccatctgggggtcgacngaactgagnaggcantaangaaaaaa

SEQ ID NO: 3824 - DNA, 178 bp, Zea mays
  misc_feature: Incyte ID No: 700453872H1
  unsure 14, 35, 60, 91, 136, 162, 175: a, t, c, g, or other
ctcgagccctcgcncctctcaaacctccgcgctcncgcccagctagggtttccccgatcncccctcctcctcaaccgccgccgtctccganagcgccgccacgatgttggagctgcggcttgtgcaggggagcctncctcaagaaggtcctggaggcgatcnggagtggtcaacnacg

SEQ ID NO: 3825 - DNA, 176 bp, Zea mays
  misc_feature: Incyte ID No: 700453874H1
  unsure 169: a, t, c, g, or other
cgcgttcgacccggtagcccgaaaccgcccatatatcttgccaactttctgcgacacggtggaggcgtggagctaactacccccgcgctggctcgccaccgccgccgcagcaggcgtgggaatctgggcagcgccccgcggagaagaggaggcagcgcgctctccgtcngcaatgg

SEQ ID NO: 3826 - DNA, 174 bp, Zea mays
  misc_feature: Incyte ID No: 700453875H1
  unsure 88: a, t, c, g, or other
ctcctatctggtataggacggagctgagcttctagcaacgtacagtgtatccgccatgagtcctttcggggcggtgatcacgccaganaccctcaagtacatgtccaagtaccagggacgtgagatcacgcaggtggactgcgcacgggaggcgatgaggtgatccacgcggaa

SEQ ID NO: 3827 - DNA, 134 bp, Zea mays
  misc_feature: Incyte ID No: 700453878H1
  unsure 49, 52, 121, 124-125, 127, 130: a, t, c, g, or other
attttagtagctgttcaccttccactctttgtgatttcggttgtatagnacntgaaggagactgagaagattaaatctctttgtatttaattttaaatagtaaagaatttaggcccaaaanaannanaanaaat

SEQ ID NO: 3828 - DNA, 179 bp, Zea mays
  misc_feature: Incyte ID No: 700453879H1
  unsure 61, 93, 168: a, t, c, g, or other
ctcgagccctcgcccctctcaaacctccgcgctcccgcccagctagggtttccccgatctncccctccttcctcaaccgccgccgtctccganagcgccgccacgatgttggagctgcggcttgtgcaggggagcctcctcaagaaggtcctggaggcgatccgcganctggtcaacga

SEQ ID NO: 3829 - DNA, 179 bp, Zea mays
  misc_feature: Incyte ID No: 700453882H1
  unsure 66, 100, 147, 155: a, t, c, g, or other
cataatattgctgagcttctggagtatttatgggatgttcctagtcaccgaaacgcatggagacanataggctaaagaggaggagaagggtgtatacttnaattttcttaactttctcataaatgatagcatctatcttcttgacgngagtgtgnacaaaattcttgaactgaaagaaa

SEQ ID NO: 3830 - DNA, 272 bp, Zea mays
  misc_feature: Incyte ID No: 700453884H1
  unsure 199, 203, 207, 211-212, 214, 221, 226-227, 230, 248, 257, 260-265, 270: a, t, c, g, or other
cgacgggttacttgatctcaacttcccaccggctgcagcggaggagacctgaaccaagcttgccgcgaagtgatgaatgtggggctctgtacagattcatccaattcaatttatttttttcccccaagcttaccaagggagtcttgaagcaggagtcgggttttctatcaggttattacttcaatggtttaagcattcnggtnctcngtanntnggtcaantaggnngcnaagcgtggtggataaaanaaaagaganagnnnnnnaattngt

SEQ ID NO: 3831 - DNA, 180 bp, Zea mays
  misc_feature: Incyte ID No: 700453885H1
  unsure 28, 44, 67, 79, 84, 91, 94, 104, 122, 132, 162: a, t, c, g, or other
cgccgcctgatcgaagtgaacaagcaangaagagccatggcgangcgagcacgctgcggggggcgangctaagcatgancagangcagagnctnatggacaagngcgaaagggttcgttatngagaagatcncgcacatccccaagcccgaggcgaacgctngacggcgtgacgtttcaa

SEQ ID NO: 3832 - DNA, 174 bp, Zea mays
  misc_feature: Incyte ID No: 700453888H1
  unsure 44, 81, 97, 99, 126, 129, 139, 148, 156-157, 167, 170: a, t, c, g, or other
ctgagctgcagtggcaattagaccagaagatccccgctcctgtntctaaagaggggaaagggcaaggatggtggaggcttnctgtgctacctggaancnggccaacagtcagaactttgatgagtncangaaggctctnggcgtgggntttcccannaggcagtggnaantgtc

SEQ ID NO: 3833 - DNA, 176 bp, Zea mays
  misc_feature: Incyte ID No: 700453889H1
  unsure 27, 36, 38, 51, 65, 68, 73, 83, 85, 105, 119, 127, 142-143, 149, 155,163, 171: a, t, c, g, or other
aaacacaagcctcagatctcagtcacntgcgccgcngnttcgttcgtgtgnatgggagaagagangtnattgnggctaccgangncgtggctcctggggatgggnaaccccctcctcgncatctccnccgtcgttcgatgannccttcntgacanaagtatgncatcaagntgaac

SEQ ID NO: 3834 - DNA, 136 bp, Zea mays
  misc_feature: Incyte ID No: 700453892H1
  unsure 117, 133-134: a, t, c, g, or other
acatccgtagcgcccagccgccggagaagaggagggagccagcaccagccaccatgggtcgcgtccgcaccaagaccgtgaagaagacctccaggcaggtgatcgagaagtactacncccgcatgaccctcgnntt

SEQ ID NO: 3835 - DNA, 270 bp, Zea mays
  misc_feature: Incyte ID No: 700453894H1
  unsure 190, 193, 200, 215, 224, 231, 233, 237, 242-243, 252, 264-265: a, t, c, g, or other
gcaatggtggtatgggccaagggccaccagctgagggatgtaagcttcagatttcgtgatcagcagaggcttgggaacatcaaacttggagatgggctaatcctcactgacctcgatctcctcatcgaagatccggcgaattcgggcgatccaccgtgcttcatcaaatgtgagcgttggacatgatgtnacnatagctnaagggaataaaaagntagtccacncaattgnanttcngcccnnttaaaaagngttttttccaanntagaa

SEQ ID NO: 3836 - DNA, 173 bp, Zea mays
  misc_feature: Incyte ID No: 700453895H1
gtgacgaactcgaagcttgcgttcttgtagtagaggtcggcagcaagccgtggtagagcgagaggtcgagaagatgaagagcagcactctgttggcgatcctagttctccaggcccttctggtctctgcggccgtggccaaaggacctgcagggccgacgacgaagaagcagt

SEQ ID NO: 3837 - DNA, 176 bp, Zea mays
  misc_feature: Incyte ID No: 700453896H1
  unsure 19, 54, 65, 75, 150: a, t, c, g, or other
gtaacttcagaggcaacanagctagaacatactatcatgatgagcagcaagaantacagctatgntccaaaggantctcatgcataccatgataacaccaagaatgcccgtgcattcttcatactctaatgggaaaaatagagttccaanaccatctcgtgatcactatgatgatg

SEQ ID NO: 3838 - DNA, 107 bp, Zea mays
  misc_feature: Incyte ID No: 700453903H1
  unsure 8, 20, 26-27, 32, 37, 45, 69, 82, 100: a, t, c, g, or other
tgcaagcnacgcgtcgtagncccatnncgttnccgangcctacgnacgtagagattctgcaccgtacgnacggaaccacacncgtcagtccgtagcgtgngtccgac

SEQ ID NO: 3839 - DNA, 290 bp, Zea mays
  misc_feature: Incyte ID No: 700453906H1
gggaagcgttccagaaacaaccgcactcttggaacagagatgggataagatcttctacacaggtaatggaactgtaggacgtatagtgatggcagcagccgcaaagcatctgaccccggtagctctggagcttggtgggaaatcccctgttatcgtggattcaaatgttgatctccatgttgctgctaagaggattgttgttggcaaatggggatgcaacaacggccaagcatgcattgctccagattacatcataacgacaaaatcatttgcaccggagctggtggcct

SEQ ID NO: 3840 - DNA, 97 bp, Zea mays
  misc_feature: Incyte ID No: 700453907H1
  unsure 86: a, t, c, g, or other
tctcttacctggtcctcgttctgctgttctaactgcctgcgccgattcgagaacaacttccaccagagtcgcctagccgggagcancataaaaatgg

SEQ ID NO: 3841 - DNA, 104 bp, Zea mays
  misc_feature: Incyte ID No: 700453912H1
  unsure 3, 25, 43, 45, 50, 64, 67, 73, 86: a, t, c, g, or other
gcngtcccctttcctgtataataanacctgcaaatcgtctctntnccgtncctcccctaccacngcngcagcngccgccgtacctncctcctcccgcggcagag

SEQ ID NO: 3842 - DNA, 197 bp, Zea mays
  misc_feature: Incyte ID No: 700453914H1
  unsure 31, 65-66, 126, 155, 161, 183, 190: a, t, c, g, or other
taattgcctaacatggaagatgagtggatgntacagtggaatgcataccaggttttacacaaggnngccggttccttacctttctgattgaatcctgataatatatggtgcaatgccatccctttnttctcctaattttgttaaacacatgcacntcagcncatggcacaatatgtccaaacncactcancttggtg

SEQ ID NO: 3843 - DNA, 126 bp, Zea mays
  misc_feature: Incyte ID No: 700453915H1
  unsure 7, 39, 65, 71, 77, 82, 94, 109, 119-120, 122: a, t, c, g, or other
aaccttnatccgaatcgccgttgcatagaggacgtggcncgacgtcggcgagcgtgggtcgccantcgctncctccncatantcacggtcgacncttcaagaaattganaaggtactgnncnaaat

SEQ ID NO: 3844 - DNA, 293 bp, Zea mays
  misc_feature: Incyte ID No: 700453919H1
  unsure 106, 117, 122, 133, 136, 138, 141-142, 154, 158, 161, 165, 170, 174-176: a, t, c, g, or other
gaaaattgccatatgaacaatgagaaaatgcttctaaagcaaaatgtggatgagcaacagatggagaacgagcagatgcttatagatcaggtcactagtgttcaantttgggatatncaccntgtgcacgatnaananttnntggtaggtcatnctgnagntgancatcnccannnggacccaaatcccatggctttttctttgggtgttcatgatctggataactactatctgagcagcaagcaaatacttctgtataatgatgtaggaggtatacaccatttgaaggatgt

SEQ ID NO: 3845 - DNA, 232 bp, Zea mays
  misc_feature: Incyte ID No: 700453920H1
  unsure 47, 58, 61, 106, 122, 129, 131, 225: a, t, c, g, or other
actgaatactacaatggagctcacgtgggacgaatgggatgtcattntactggctgcntgnagcttcctacatccctctcgtgttcctctgcaatgctacgaagcngcggcggcggcgcgcnccccctngnccggccaccgtacccatcatcgggaacctgggcgttgctaacgttgcgcgacgggttgggtgatctggacatcctgcgaacgactgtactcgcnctttggc

SEQ ID NO: 3846 - DNA, 287 bp, Zea mays
  misc_feature: Incyte ID No: 700453922H1
  unsure 128, 152, 157, 159, 169, 171, 186: a, t, c, g, or other
gaggcgtcggcagagctcgcgtccagaggtgcacggcaggcctgttctcggcgtcggctgggggaaggcgagtagccgcgggaaggacgagtgaataatcatgagctcgatctgccctttcgcggganccaccactggtggtggtgtatgcnctgtnanatctgataanancaacactggggtgtnccctgcaaaatctgacaagagcatcagtggtgtatgccctgtcactggcaaggatcatggtagcaagctcaaggaaagtggtgatcatggtgaagaaaagg

SEQ ID NO: 3847 - DNA, 135 bp, Zea mays
  misc_feature: Incyte ID No: 700453923H1
  unsure 56, 91: a, t, c, g, or other
ccgacaacaggtactaaccgaggcatggacagggagcagatgaggatggccatccngaaccaagaacggatcttcagacaacaggtacacnagctgcaccggctgtaccacgcccagaagcagctgatgatgcag

SEQ ID NO: 3848 - DNA, 91 bp, Zea mays
  misc_feature: Incyte ID No: 700453924H1
  unsure 67, 77: a, t, c, g, or other
atctttcaaggtagaccttgttttaactgaagttgaactgcctttgatgtctgggttcctcctgttnatccacgatncatggaaccatgat

SEQ ID NO: 3849 - DNA, 286 bp, Zea mays
  misc_feature: Incyte ID No: 700453925H1
  unsure 17, 26, 65, 116, 122, 136, 167: a, t, c, g, or other
agaagagtcattagccnaagtaaagntcagccaagtaactaatgctcgagcaggcagctacagcngaggaatgaagcgccggctaagtgttgcgatcgcactgattggtgacccanaattgntttttctcgatgancctgtgatgaaatagaaaaattttcattgtnttgttccttagactcccttgtggccctgtcacatgtcaatctaactaaatgtatatgctttgtagactactggcatggatccaataacaaggaggcagtctgggacatcataggaggag

SEQ ID NO: 3850 - DNA, 158 bp, Zea mays
  misc_feature: Incyte ID No: 700453927H1
  unsure 9, 13, 40, 42, 98, 102, 124, 127, 141, 156: a, t, c, g, or other
aattaatcntgtngaaggctatggagggctccctatgaangntcagatgttcctttcgactgctcttacaatgtgggacgctgatttctatgtaaaanccgncgataatgtccatgtcaacatnggnatcaccagatcgantttggcgcgacacanga

SEQ ID NO: 3851 - DNA, 106 bp, Zea mays
  misc_feature: Incyte ID No: 700453929H1
atctttcaaggtagaccttgttttaactgaagttgaactggcctttgatgtctgggttcctccctgttataccacgatcatggaacatgatgcgtccaagaacatc

SEQ ID NO: 3852 - DNA, 106 bp, Zea mays
  misc_feature: Incyte ID No: 700453930H1
  unsure 42, 68, 75, 85, 102: a, t, c, g, or other
gtgttatgcaaaataatgctggctgtattccgtacacaaganacacttgaagaaggttgtgagctgantagcaanaccatggganagtttccatgatgtgangctc

SEQ ID NO: 3853 - DNA, 100 bp, Zea mays
  misc_feature: Incyte ID No: 700453931H1
  unsure 18, 37-38, 56, 89, 92, 94: a, t, c, g, or other
gcaatctggtccgaatantagttcgatgactgaaagnngccacattattgaaaggnatgcaggagttcaatgctgtatctgataaacanaanantggtac

SEQ ID NO: 3854 - DNA, 129 bp, Zea mays
  misc_feature: Incyte ID No: 700453933H1
  unsure 15, 41, 57, 59, 79: a, t, c, g, or other
ctcgagtgacactanaaaaatctggtgtcgtgttggatttngtgccaccactaaacnanggttaacaacctgatatttnggcgcacttgggttgattctcctggagagatggtcatgacgaacctgaca

SEQ ID NO: 3855 - DNA, 288 bp, Zea mays
  misc_feature: Incyte ID No: 700453937H1
  unsure 142, 241, 249: a, t, c, g, or other
ctccttggaagcttcgaagctagcgtaccgcctgctggagttcatggcaaggggcgtgggtgccgacccggcgtcgctgcagagcatgttccaagggcaggtgcagggcatgcgggtgaactactacccgccgtgccagcangcggcggaccaggtgctgggcctgtgcgccgcacagcgaccccaacgggctcaccctgctcctgcagatgagccacgacgtgcacgggcttcaggtcancaaggacngcaggtggttccccgtgcaggctctccccggcgccttcg

SEQ ID NO: 3856 - DNA, 284 bp, Zea mays
  misc_feature: Incyte ID No: 700453938H1
  unsure 43: a, t, c, g, or other
cttgccctaacagatcatgacaccatggctggcataccagaanctgtgtcagcagcctccaagtttggcatgagaataattcctggagttgaaatcagtgcgctatataatccaagggaagttgctggtgcgggtgagactgttcatatccttgcatactatggtatgtgtggtccgtcaaggtgtgatgagttggacggcatgctattgaacattagagatgggcgatacttacgtgcaaagaacatgctggaaaagctaactacactgaaggtgccaataaa

SEQ ID NO: 3857 - DNA, 156 bp, Zea mays
  misc_feature: Incyte ID No: 700453939H1
  unsure 46, 115: a, t, c, g, or other
ccactgtggaagtctggtagaattaggagctattctgggggtctgnatatgtaactgacatttgcattatgctgtgctagtgtattattaaccagtgactttccttgctaaaaangtgtagcatcgttacttgttcagcgctggacgtacttttca

SEQ ID NO: 3858 - DNA, 96 bp, Zea mays
  misc_feature: Incyte ID No: 700453942H1
  unsure 45, 54, 76: a, t, c, g, or other
gcggcagcatcaccgtcaaggtcaacgtaccccaccgtgccgctncgccgattngctttcatcggtcatgttcatntcctccggtgtgcatgaaga

SEQ ID NO: 3859 - DNA, 111 bp, Zea mays
  misc_feature: Incyte ID No: 700453943H1
cttctcgtgatgttgtttcaagatcaatgacaatggaaattagagaaggacgtggtgtagggccattgaaggatcacatttatttgcatctgaaccatctgccacctgagg

SEQ ID NO: 3860 - DNA, 93 bp, Zea mays
  misc_feature: Incyte ID No: 700453944H1
  unsure 69, 79: a, t, c, g, or other
aaattcgcttatgctgtccaagacttatgcttacgttatgtctgtaggcttttgttattacaagtactncaagttttgngtttttgagatgtg

SEQ ID NO: 3861 - DNA, 294 bp, Zea mays
  misc_feature: Incyte ID No: 700453949H1
  unsure 10, 17, 72, 101, 119, 185: a, t, c, g, or other
ggcgcttcgngagccgnggcttatggtgcagacatggccaagtccaagaaccacaccacacacaaccagtcncgaaaatggcacagaaatggtatcaaganaccccgatcacaaagatncgaatctcttaagggggtggaccccaagttcctgaggaacatgcgctttgccaagaagcacaacanaaagggcctaaagaagatgcaggccaacaatgccaaggccatgagtgcacgtgccgaggctatcaaggccctcgtaaagcccaaggaggttaagcccaagatcccaaag

SEQ ID NO: 3862 - DNA, 159 bp, Zea mays
  misc_feature: Incyte ID No: 700453950H1
  unsure 17, 52, 71, 104, 114, 119: a, t, c, g, or other
cgtttagaacctctaanatttcccccactcgccagtcgcagcatcacctgtngcagccatggacgccagcngagccggtagcaaggggaagaagggggcggccnggcgcaatgnaggcngccccaggaagaattcggtgacgcggtccgtcaaggccgg

SEQ ID NO: 3863 - DNA, 286 bp, Zea mays
  misc_feature: Incyte ID No: 700453953H1
  unsure 3, 32, 34, 36, 47, 51, 56-57, 111, 143, 200, 209: a, t, c, g, or other
ttntcctctcccccagatccacccgccgcgcnancnctctgcggctnctcncaggnngcgtcggccctttgcctcgccctcctccgtttctctccggcgtatatatgggtncgaaatcggtagatgaggtgctcgatgccgcngccggagtccattgctctgctctccgtctggacggtcccaacgtccagttttccgcntcctccgangaagaaccaacgacgtctggcctggagaatggccatcaggagccctttgttattggcgttgctgggggtgcatcgtt

SEQ ID NO: 3864 - DNA, 283 bp, Zea mays
  misc_feature: Incyte ID No: 700453954H1
  unsure 76, 233, 279: a, t, c, g, or other
caaatcggcttcatcttacgtatgcaaacttcacacatccttgcgaaggtttctcagtccctcctcccctggttgntaagaaacgcactggaccccgaccatgccctgtttgctatgtttctgtggatcaggcatttgccttgatgcccctacaagcttcaccatcacctgtcgtaaagaacttaaactatgtatcagaagatggtgttactgcaaatttatcaaatctaggntctggatttggagggcatccatctctggagcagcgaaacaaatctntcaa

SEQ ID NO: 3865 - DNA, 154 bp, Zea mays
  misc_feature: Incyte ID No: 700453956H1
  unsure 36, 110, 121, 140: a, t, c, g, or other
ctgtactgtattcagcaattcagcagttctgatgtncgattttggattgagtccagaaaatgctgttgaggtttgaactagggagcccagcattcctctggctttgtacngttgcaagagnaagaacatatgctaggaantggtattgcagtgg

SEQ ID NO: 3866 - DNA, 155 bp, Zea mays
  misc_feature: Incyte ID No: 700453958H1
  unsure 112-113: a, t, c, g, or other
ggagaggagaggaacagagccaagaaacaagcccggaagatggcaggcggcggagtggtgaagcacatcctgctggcaagcttcaaggaggaggtgacgcaggagcgcctgnnacgagctcatccgaggatacgccgcgctcgtccggcgtggtc

SEQ ID NO: 3867 - DNA, 104 bp, Zea mays
  misc_feature: Incyte ID No: 700453960H1
  unsure 21, 34, 46, 77, 90: a, t, c, g, or other
cacaaaggaaattttagaaanacatgcttaaagncaactggtaggnaaagtgatgacccgttttccaccagaacctnaatggatatcttncatattggtgcatg

SEQ ID NO: 3868 - DNA, 97 bp, Zea mays
  misc_feature: Incyte ID No: 700453961H1
  unsure 61, 63, 68, 72, 82, 85, 88, 90, 96: a, t, c, g, or other
cctatctggtataggacggatgctgagctgtctagcaacgtgacagtgtatccgccatgantnccttntacngcggcggctnatncangnccaganc

SEQ ID NO: 3869 - DNA, 92 bp, Zea mays
  misc_feature: Incyte ID No: 700453962H1
  unsure 13, 20, 72: a, t, c, g, or other
ctatctggtatangacgganctgagcttctcagcaagcgtacagtgtatccgcccatgagtgcctttcgggngcggtgatgcacgccagaaa

SEQ ID NO: 3870 - DNA, 204 bp, Zea mays
  misc_feature: Incyte ID No: 700453963H1
actacataaaatagcatgccgtctctgtcactggcaatggacggtggtgcctagcgcaactcagcgcacaactgtgtgtcttgatttttcttctgtttatcacggcattagtgccatgccgttttatgttacagtgttgtgtgctcgcaagcatccgaaaatatggcgtctgagtttagggttgggtcaaacttgtcgaatttg

SEQ ID NO: 3871 - DNA, 126 bp, Zea mays
  misc_feature: Incyte ID No: 700453964H1
  unsure 51, 63, 114: a, t, c, g, or other
gccggcaagccgctggagatctgcgccatccccaacgtgtccagcggcgcncggcagcccgancagctcaccaagggcaagttcaacaacgctttcccgtcgagcagccccgangggaacaggttt

SEQ ID NO: 3872 - DNA, 290 bp, Zea mays
  misc_feature: Incyte ID No: 700453965H1
  unsure 89, 182-183: a, t, c, g, or other
ccgaagctcaatcaattcactcaaacctcttccccaaatcttcgattagattctcgttgacaagaagactagaaccgaacctgaccatntcgctgatccgccgcagcaacgtgttcgatcccttctccctcgacctctgggacccctttgagggcttccccttcggctccggcagcagcagnngtctcttcccctcgttcccgcggaccagctcggagaccgcggccttcgctggcgcgcggatcgactggaaggagactccagaggcgcacgtgttcaaggcagacgta

SEQ ID NO: 3873 - DNA, 147 bp, Zea mays
  misc_feature: Incyte ID No: 700453966H1
  unsure 14, 19, 25, 50, 64-65, 131, 138-139: a, t, c, g, or other
cggaatcgtacgangatgncatctngtgaacatgcggcacacattattcntcgtctcgatttanncagtgccgcatgttcacaagatgcatcactaataaatcgagacgaagaataatgtgttttcaaaanaaaaaannaaaagggg

SEQ ID NO: 3874 - DNA, 94 bp, Zea mays
  misc_feature: Incyte ID No: 700453967H1
  unsure 10, 12, 20, 41-42, 68, 76: a, t, c, g, or other
gcatatcgangnaggttttnagggtggtaggtggtcgttgnngaggagctgctgcacgctgctgctcncagttctnccaccgatgggcgatcaa

SEQ ID NO: 3875 - DNA, 277 bp, Zea mays
  misc_feature: Incyte ID No: 700453970H1
  unsure 21, 29, 33, 37, 86, 122, 133, 143, 194, 219, 236, 267-268: a, t, c, g, or other
gctcgtgttagctcctggctnacgagcanaccntatngctttagttctgtggaagtgggcgcgatttcgtcatgtcatgcatgtgntagctcctggctaacctgcaaatgcgtgtgttggtncaggtttttgncacgtctgcntcagtacctggctgaccagcagttgtttgtcgttcattctctgcgtcagtncctggctgaccagcagttatttgtngttcattcttgcgctanaccaggctaggctgcaaaactgcaaatattnnttgcatgga

SEQ ID NO: 3876 - DNA, 175 bp, Zea mays
  misc_feature: Incyte ID No: 700453971H1
  unsure 34: a, t, c, g, or other
cctatctggtataggacggagctgagcttctagnaacgtacagtgtatccgccatgagtcctttcggggcggtgatcacgccagaaaccctcaagtacatgtccaagtaccagggacgtgagatcacgcaggtggactgcgcacgggaggcgatgaggctgatccacgcggaaga

SEQ ID NO: 3877 - DNA, 89 bp, Zea mays
  misc_feature: Incyte ID No: 700453972H1
  unsure 23, 30, 34, 51, 87: a, t, c, g, or other
cgggagcaggcgacgcagcaggngatccancganttcctactcaccgcgancatgaaccgtgcatgttcggcaagtgggagttcgancc

SEQ ID NO: 3878 - DNA, 83 bp, Zea mays
  misc_feature: Incyte ID No: 700453973H1
  unsure 23, 30, 34, 42, 63, 76: a, t, c, g, or other
aagcgatcgttggaaacttatgncgtcatngganaagatccnccagttgcaagcatggattgnctgataatactgngctggtg

SEQ ID NO: 3879 - DNA, 278 bp, Zea mays
  misc_feature: Incyte ID No: 700453975H1
  unsure 157, 252, 264-265: a, t, c, g, or other
ggaagatgatgccatgccctcaggcgacaatccccagaatggcttcaactttgggaaccagccctctgttccatcaggtggattcaactttggctgaagatgcccatttggaatggccgctgtgccattatgccttggctagtgctctgggctagtncagaggtgtggggtagcggcgtcaaccaagtcatggttgagtcccattggtctggtctcagggagtgtcatgtcagtcccagtcagcaggtcaantctggggctgcnntaaccagtggtgc

SEQ ID NO: 3880 - DNA, 130 bp, Zea mays
  misc_feature: Incyte ID No: 700453977H1
  unsure 86, 107, 129: a, t, c, g, or other
acagaagctcgggccattcgtgcaggtgctcccaatctgcggcaggctgttgaatcaagagataatgagaacatcaaacctgcttnctaactttggagttagagganatgagaggttgccaccaattgna

SEQ ID NO: 3881 - DNA, 92 bp, Zea mays
  misc_feature: Incyte ID No: 700453979H1
  unsure 48, 77: a, t, c, g, or other
gcaatggtggtatgggccaagggccaccagctgagggatgtaagcttncaggatttcgtgatcagcagaggcttggnaacatccaaaccttg

SEQ ID NO: 3882 - DNA, 97 bp, Zea mays
  misc_feature: Incyte ID No: 700453980H1
  unsure 11, 17, 42, 44: a, t, c, g, or other
taggcactcancaaggnacattatttcttggaattgtataantncttgcacacttggctgcatggttctcccaagtgcaagcactgggatcgctttt

SEQ ID NO: 3883 - DNA, 285 bp, Zea mays
  misc_feature: Incyte ID No: 700453981H1
  unsure 8, 18, 31, 45, 78, 120-121, 128, 134, 165, 175, 224, 233, 268: a, t, c, g, or other
ctagccgncgccgccgangctcgtctccctnagaggtgccgggancgaggaactgggcgagtactaggtagagaatcngtttttcttgtctcagcccggggtctgctgcgtctggtggtnntgaaggngagaanttcgtgagatctgttccggatcaggcgtgcnagctcgggantcaggggtttcacacatagcttcgtcgatttgaatttgatgtactaatngagtctaanggtggcaaaaagtctagcagtagtcgttctatgangtatgaagctccccttg

SEQ ID NO: 3884 - DNA, 131 bp, Zea mays
  misc_feature: Incyte ID No: 700453982H1
  unsure 27, 49, 111: a, t, c, g, or other
ttgaagcagggactggaaaatgtgaanccaattttgtccaagatccgcnagtttattcttcacatccattgcaaaccaggagatgatggaggattttaagcactggactgnagtttatcaagaaggttcat

SEQ ID NO: 3885 - DNA, 95 bp, Zea mays
  misc_feature: Incyte ID No: 700453984H1
  unsure 5-6, 28, 49, 64, 67: a, t, c, g, or other
ctggnnccgattccgcttgcagccagangccttgctggagaggcgaganccccagctaccggcnagngacgctccctgcaaccagctcgtttctt

SEQ ID NO: 3886 - DNA, 93 bp, Zea mays
  misc_feature: Incyte ID No: 700453989H1
  unsure 20, 30, 33-35, 40, 45, 65, 71, 89: a, t, c, g, or other
gccggcgcctccactgtcgntttccttcantcnnntcctnccagntacagggtccggcgggcganaggganaggcaagatgtaacaccncgag

SEQ ID NO: 3887 - DNA, 147 bp, Zea mays
  misc_feature: Incyte ID No: 700453990H1
  unsure 17, 28, 31, 55, 104, 120, 123-124, 127: a, t, c, g, or other
ctcgctcgcctctctcnctcggtgcggngangacggactgggcaaccgccaccgncctccctttccctgcgccaggacgactggccgaacgctgcctcgcttcntcacctcttcgccggnggnnacnatcacccaccagttgctttg

SEQ ID NO: 3888 - DNA, 90 bp, Zea mays
  misc_feature: Incyte ID No: 700453992H1
  unsure 13, 19, 24, 27, 63, 81-82, 87: a, t, c, g, or other
gcaatctccccgncctcgntaccngcntaccacccaaatggtcgtgcttctccctgaacggtngcggcgccgccgcatacnngcttnatg

SEQ ID NO: 3889 - DNA, 86 bp, Zea mays
  misc_feature: Incyte ID No: 700453993H1
  unsure 3, 19, 33, 70: a, t, c, g, or other
gtnatttcacctgatggcntgtttccttcactnctaccgagaagttatagcggagcagccccacatgaanttcaagattggcttgg

SEQ ID NO: 3890 - DNA, 75 bp, Zea mays
  misc_feature: Incyte ID No: 700453995H1
  unsure 12, 16, 22, 45, 52, 60, 70, 72-73: a, t, c, g, or other
gtggagtggaancccnactcgnccccttccgcagccggtactcanccccaancctatccngtgcggagcngnncc

SEQ ID NO: 3891 - DNA, 302 bp, Zea mays
  misc_feature: Incyte ID No: 700454003H1
gtttctgagtacaaggaggcaaaagcgctcggtattgatactgtcccagtgcttgttggaccagtgtcatacttgctcctctctaagcctgccaagggtgtggagaaatctttctctcttctttcgcttcttggcagcattcttcccatctacaaggaggttgtttctgaactgaaggcagctggtgcttcatggattcagtttgatgagcctacccttgttaaagaccttgatgttcacgaattgggcagcattctcttcagcatatgtgaactagagtcggcatctctggattgaatgtg

SEQ ID NO: 3892 - DNA, 295 bp, Zea mays
  misc_feature: Incyte ID No: 700454004H1
  unsure 41, 65, 257, 277: a, t, c, g, or other
ctcccagccgtcgaaagtcgaaaaccctagccccgcctcancgccggcggtggtggcagcctcancaccggcacacagcccgccgtacctctcctcgtacgctcccttccggtgtgccgtcgccccctcgaccggtccatcgttcgtcggctcggtagccgccggatcggatcgggatcggccggcgccatgtccaaggccagggtctacaccgacgtcaacgtgctgcgccccaaggagtactgggactacgaggngtcaccgttcatggggtganaggatatatgagtttagg

SEQ ID NO: 3893 - DNA, 221 bp, Zea mays
  misc_feature: Incyte ID No: 700454007H1
gtatatctgcaaaggttactgccttggcaggcaatacaaatttctgggctgttggctgtgaagatggttacctgcaggtttacacaaaatgtggaagacgagccatgccggcaatgatgatgggatctgcagctgtttttatagactgtgatgactgctggaaattgcttcttgtcacaagaagaggtttaatgtatatatgggacctccataacaggacc

SEQ ID NO: 3894 - DNA, 299 bp, Zea mays
  misc_feature: Incyte ID No: 700454018H1
  unsure 163, 189, 293: a, t, c, g, or other
aacgcatcgcgacggctccccaaccccaacaagtctctcggccaggtctccctctccccggctctccgccttcctcttccagtccccgcgcgcgagatcgccgccccgtgtgggccctagatcccgatggcctcgcgccgccgcaccctgctcaaggtcatcntcctcggcgatagtggggttgggaanacttccttgatgaaccaatatgtgaacaagaagttcagcaatcagtacaaggctacgatcggcgcggatttctcaccaaggaggtgcagttcgagacaggtctncattct

SEQ ID NO: 3895 - DNA, 295 bp, Zea mays
  misc_feature: Incyte ID No: 700454021H1
  unsure 245: a, t, c, g, or other
atggtgtgtcacatggtgactttggttccgcagcaaggtctgcttcattcgtgccagcacctgctgaacctacagctggatcattttcaagatcttatgccgagcagacgtccaccgctgcacaacgagcggataggtcctctggcggtaagccatgggagatgcagcagtattcgcagcagaggcctggttatggatccaactcccagttgaatgatgatggatcatactctgatgcccagganagctatgctccttcctattaccagaatggaaaggcctgattttcatcaga

SEQ ID NO: 3896 - DNA, 294 bp, Zea mays
  misc_feature: Incyte ID No: 700454024H1
  unsure 52, 91, 125, 198, 220, 226, 280-281, 293: a, t, c, g, or other
aaagactgagacctattatatagtaaacgctccatacatattttctgcatgntggaaggtcgtgaagcctctgttgcaagagagaacaagnaagaaagttcatgtgttgcgtggctgcgggaganacgagcttctacagatcatggactactcctccctcccccatttctgcagacaggagggctcgggctcatccanacattcgtcaggcgactccganaactgnttctctctcgaccacccgttccaccaggagctctacagttcatccaggagcagnntgaaccatgagnt

SEQ ID NO: 3897 - DNA, 283 bp, Zea mays
  misc_feature: Incyte ID No: 700454027H1
  unsure 53, 70: a, t, c, g, or other
ctgtttccgcgcgcgagatcgccgccccgggtgggctctagatcccgatggcntcgcgccgccgcaccangctcaaggtcatcatcctcggcgacagggggttgggaagacgtctttgatgaaccaatatgtgaacaagaagttcagcaaccagtacaaggctacgattggggcggatttcctcaccaaggaggtgcagttcgaggacaggctcttcactctgcaaatatgggacactgctggtcaggaaaggtttcagagtcttggcttgcattctaccggg

SEQ ID NO: 3898 - DNA, 167 bp, Zea mays
  misc_feature: Incyte ID No: 700454028H1
  unsure 127: a, t, c, g, or other
gacacatccatgtcccaatctcccccaacctcaggtcaaccgccgctacccaagatccagtctccgttctccctctcctctcgcttcatacacaccagggcggcagcggcagcggcaggggcccgcnatcaccaacccacctcccttcaattataaacctataaaat

SEQ ID NO: 3899 - DNA, 283 bp, Zea mays
  misc_feature: Incyte ID No: 700454029H1
  unsure 22, 76, 140, 156, 178, 185, 205-227, 268, 277: a, t, c, g, or other
cggcgtcgcccaaacccaaggncaaggccaaggccaagcctgtcgctcctggccgccgcgtcgcccaagccccgcnggcgccctcccaaggtcgccaagacctccgccaaggcctcccccgccaaggcagccaagaaggnggctgctcctgccaanaagggaaaggcagcggcggctnctaaganggtggcaaccccgaagaagnnnnnnnnnnnnnnnnnnnnnnncaggaaggggtggccaggaaggcaaagaagtatctgcctgntttcgtggnagatcc

SEQ ID NO: 3900 - DNA, 288 bp, Zea mays
  misc_feature: Incyte ID No: 700454030H1
ctcgacgaagcagccagacgacaggcaggtagcaccggggtcaacgcggcagacaaacaggctctcccgctcgtcagctagcagccatgagtaccatgaagttttgccgtgaatgcaacaacatcctgtaccccaaggaggaccgggagcagaaggtgctcctctacgcctgccggaactgcgaccaccaggaggtcgcggacaacaactgcgtgtaccggaacgtggtgcaccacagcgccggggagttcacccaggtgctccaggacgtggcggcgaccccacgct

SEQ ID NO: 3901 - DNA, 79 bp, Zea mays
  misc_feature: Incyte ID No: 700454033H1
  unsure 22-23, 64, 71, 73, 77: a, t, c, g, or other
gtggagtggaaaccctactcgnncccttccgcagccggtactcaaccccaaccctatcctgtgncggggcngngacncg

SEQ ID NO: 3902 - DNA, 292 bp, Zea mays
  misc_feature: Incyte ID No: 700454035H1
  unsure 148-149, 229: a, t, c, g, or other
ctccctctcgcgtctacttccctgcgcacgcgccgcgccctggattcctctctctccctcgcgtcttcctcccactgccatggcgcccctctccctggtgctttcccatggcatgccccgagctcctcccagcccaaccgctccttcnnctgctcctccctgtttgccatcgctctagctcgcctggtcgccaaactccaagaacctgcgccgctcgcctccctgtgcngacgtcgtattctggtggccgcgtccatcctgcacctcccttccaggcacgccgccccaagct

SEQ ID NO: 3903 - DNA, 297 bp, Zea mays
  misc_feature: Incyte ID No: 700454037H1
  unsure 213, 225: a, t, c, g, or other
gcagctcgacttctcgcccagcggcatctgctccatggtgcaggtcaccgacctcaagaactcgccgcccatgctcggcaagcaccgcgccgtcacgcgccaggctctcgccctgctacaggacaactacccggagttcgtggccaagaaggtgttcatcaacgtgccgtggtggtacctggcggcaaacaaggtgatgagcccattcctgantcagcgcaccangagcaagatcgtcttctgcagccccggcaatcggcggagaccctcttcaggtacacgccccgggagcaagtc

SEQ ID NO: 3904 - DNA, 176 bp, Zea mays
  misc_feature: Incyte ID No: 700454038H1
  unsure 19, 39, 58, 62, 71, 77, 92, 103, 111, 122, 138, 162, 173: a, t, c, g, or other
agaaccagcagaggtccangtcgattccgggctgctaangacgcggctgatgcggcancgcnagtgaaganatgctnaggaaggagtttgangcagagggtangactctancccagaaagangagtcggaggcaattnactccaatgtcatgactccagggnacggattcatnttc

SEQ ID NO: 3905 - DNA, 126 bp, Zea mays
  misc_feature: Incyte ID No: 700454039H1
  unsure 36, 43, 54, 60, 69, 74, 82, 85, 118, 124: a, t, c, g, or other
cactgctgagcgtgagattgtccgggacatcaaggntgaaacngtgttatgtanctctgnactttgaanatganatggccantgncgcatccttcatcctcccttgagaagagttacnagttgnct

SEQ ID NO: 3906 - DNA, 291 bp, Zea mays
  misc_feature: Incyte ID No: 700454040H1
  unsure 50, 64, 122: a, t, c, g, or other
gtccggactgacgaatcggggacggagattcacatcaacgcagatgtggnaccccacgaccgantcgtcgcgtcgtctcctccgcttccgacactctcctgctctgcctcctcctgcttgcnggcgccgccgacgccgcgccgctgctcgtaggcgtttttcccaaagatgaggcgtacttcgcgacgcaggtgatcgcctgcagagacggctcgggctctttcccgaggagccggctcaacgacgggtactgcgactgcggcgatggaaccgatgaccaggcattcagtt

SEQ ID NO: 3907 - DNA, 162 bp, Zea mays
  misc_feature: Incyte ID No: 700454042H1
  unsure 24, 30, 46, 51, 62, 67, 70, 104, 113, 133, 140, 146: a, t, c, g, or other
gcaatgactcgtcttcccttctcngtttcnagcgacgggcgaaggncgaangggaaggagcngtgangangaaacagaagaggcagccatggccgtgatggagnaggctcaangatcttccgttgtgaaggancctgttntcgcantttcctttctcatcgg

SEQ ID NO: 3908 - DNA, 295 bp, Zea mays
  misc_feature: Incyte ID No: 700454043H1
  unsure 141, 146, 214, 216, 220, 223, 254, 270, 281, 284, 286: a, t, c, g, or other
gcgctatctcctccgcggctctgcgcgcagtcgtgttggcaactgcagcggggcggcggcgtgcgtccctgctgtgagcttcatcgccccgtatcaagctagtttaggctgtcagcgggccacaacttcagccacacaacncgganctccgacaaccctcgcggctcgtgccgccctctcccgctcggtcgttcctatggatccaccgcaagantnggcngcngccggccgcaagcggcgccggcgaggaggcntccggaaccgcaaaangctttcctcgngangnggctccctc

SEQ ID NO: 3909 - DNA, 295 bp, Zea mays
  misc_feature: Incyte ID No: 700454046H1
  unsure 107-108, 110, 112, 187, 224, 249, 272: a, t, c, g, or other
gggatgtgaagggtccacaaaccattgctttcaatttgcccaatgatgaaaggattgtgaatgaacgaggaacttccatggttatgctcaaaaacatttcagaagcnnananaaagcatatcttaaagcctatagctgatgcctgcatcagagaggaacaaaaggaatatgttgatttcgagccatnttatacacatatagtctgtcatgaatgctgccatggnatggacctcattctatcacccttcnaagtggtaaaaaaacaacagttngaagggactcaagaatccatcag

SEQ ID NO: 3910 - DNA, 291 bp, Zea mays
  misc_feature: Incyte ID No: 700454049H1
  unsure 232, 269, 285: a, t, c, g, or other
ggggggccgtggtgtcggactcggacggcgagatggtcgcgaacggcggcgagccaggaggtggcgggagcacgagcacacgggctcctctccccgatcccgatctgtgtgcctggctgcttgcaacctccgtgggatggaggcggcgcggcagcagcaggaggagtgctcgtgcggcggggccgaggccgctgaccagttcgagcggctccacgacgcggtgctgctcgangtcctcaatcgcatcgacgacgtcaaggcgctaggcngtgcgtctgtcaaaantcagtt

SEQ ID NO: 3911 - DNA, 290 bp, Zea mays
  misc_feature: Incyte ID No: 700454054H1
aaaagactgagacctattatatagtaaacgctccatacatattttctgcatgttggaaggtcgtgaagcctctgttgcaagagagaacaaggaagaaagttcatgtgttgcgtggctgcgggagagacgagcttctacagatcatggactactcctccctcccccatttctgcagacaggagggctcgggctcatccaaacattcgtcaggcgactccgataactgcttctctctcgaccacccgttccaccaggagctctacagcttcatccagagcaggcgtgaacca

SEQ ID NO: 3912 - DNA, 122 bp, Zea mays
  misc_feature: Incyte ID No: 700454055H1
gcgaacttttctcgtgattttgactcaacaattggctgaatgctatataaagttcaaagaagggcacaaggtttttattcaaatttaatttgatcgatcgaattgttgcaacagaaaaaaaa

SEQ ID NO: 3913 - DNA, 289 bp, Zea mays
  misc_feature: Incyte ID No: 700454063H1
  unsure 174, 203, 257: a, t, c, g, or other
cctccctacctcgccgtcgccgtcgcatctgccatgggggcgtacaagtacgtctcggagttatggagaaggaagcaatccgacgtgatgcggttcgttcaacgcgtgcgctgttgggagtacaggcagcagccggccatcgtccgcctcacaaggcccacccgccccgacaangccgccgcctcggcttcaaggccaagcangggtatgttgtttaccgcgtccgtgtgaggcgtggtggcaggaagaggcctgtnccgaaggtattgttatgcaagccaagcacagg

SEQ ID NO: 3914 - DNA, 290 bp, Zea mays
  misc_feature: Incyte ID No: 700454064H1
  unsure 166, 198-199, 281: a, t, c, g, or other
ggccttcttgaagttatggccgcattcccttcagctaagccaccactgggagtgttttttgcagcaatagctcctcgtctgcaaccacgatactactcaatttcatcatctccaaagatggctccctccagaattcatgtaacatgtgcgttagtttatgggcctncaccaacaggaaggatccaccaaggagtttgnncaacatggatgaagaatacaattcctctggatatagcgagaatgcagctgggtcccatcttgtgaggcagtcaaattcaagntacctgctg

SEQ ID NO: 3915 - DNA, 287 bp, Zea mays
  misc_feature: Incyte ID No: 700454067H1
  unsure 2, 28, 73, 84, 94, 125, 138, 143, 178, 189, 192, 203, 215, 253, 266,279-280: a, t, c, g, or other
cnacggcaccgccgtcgtgctctggganaagtgcaagggcgacaaccagagctggaagatcctgccgtggggncccgaggccanctcctccgcngcccacgcgggaggcccgcacgccgtgcgcntcttctgcaaggncggcngcgaggactacagcctcacggtgcgcaacggcacngcgtgcctggngcncaccaacccgngggacgagtacnagcatggttcaaggacatgcgccacagcacccgggtgnggacgaggagggntaccggcttcgcnncgtcaca

SEQ ID NO: 3916 - DNA, 283 bp, Zea mays
  misc_feature: Incyte ID No: 700454068H1
  unsure 145, 162, 214, 256, 267, 275, 277: a, t, c, g, or other
aaaagaaatggtggccataaagatcatcaggggcattaagaagtacagggatgctgcaatgatcgaaattggcatgcttgagaagcttggtaaatatggtgaaagcagatccagttgtgttcaaattcggaactggtttgactancgtaaccatatctgtantgtctttgagaggcttggaccaagcttagaaggattttctgaggaaaaacanttaccgctcattcccattgcctattctggggttgccaaacanctgttggaatnatgatgantngcccca

SEQ ID NO: 3917 - DNA, 288 bp, Zea mays
  misc_feature: Incyte ID No: 700454074H1
  unsure 27, 151, 155, 164, 180, 211, 216, 228, 254, 263, 269, 273, 283, 285: a, t, c, g, or other
gctcaccagcagctgccccttgctgtngccgcctctctccgcgcgaccgatctaccgccgccgccaccatgtcgctgatcgccggcgaggacttccaacatattctgcgtctgctgaacaccaacgtggatgggaagcagaagatcatgtncgcnatgacctcnataaagggtgttgggngcagcttctcgaacatcgtctgcaagaaggnccganatcgacatgaanaagagggcggtgagctgacgcctgangagctggancgcctnattncgtcgtggcnancct

SEQ ID NO: 3918 - DNA, 133 bp, Zea mays
  misc_feature: Incyte ID No: 700454075H1
  unsure 38, 48, 53, 76, 122, 132: a, t, c, g, or other
cagcagctattgtggtcgtccctcagccgcgtcgcacngcatcgcatnctacnattcgaagtcttgctgctgctgngcagccatggcgaagaattacccaaccgtgagcgccgagtacagcngggccgtccnt

SEQ ID NO: 3919 - DNA, 94 bp, Zea mays
  misc_feature: Incyte ID No: 700454080H1
  unsure 35, 51-52, 54, 67: a, t, c, g, or other
ggaaatcagcgaatttggaactacagggagatttngtgggttcatctcggnnanccatacagggggntgtgtggaatagtggaactggcaccat

SEQ ID NO: 3920 - DNA, 287 bp, Zea mays
  misc_feature: Incyte ID No: 700454082H1
  unsure 45, 67, 86, 109, 150, 155, 191: a, t, c, g, or other
gtgccacaatatctaaatgacgggagcatcatgagaggaatggcnatgcttagtcaagttgagttgncagtgtccaagcaaaatantgtcgttgttggtgggaatttgnttgtaaatggctcagctggatctggagcagcaaccactgtnctgcnacaccagttgtctcctgtttcctctattgagtttanggccacagctggactacgttctgttattggtgggcagatgtgtcgtcaaatttcaccacattctacagcaacttctggactgctgttctttgagag

SEQ ID NO: 3921 - DNA, 286 bp, Zea mays
  misc_feature: Incyte ID No: 700454083H1
  unsure 124: a, t, c, g, or other
cggagaccgagcgaggcaggcaacccaccaccgagaggcagggacaggaacaggaagccggagggaaagatgtcgtcggtgttcagcggcgatgagacggcccccttcttcggcttcctcggtnccgccgccgccctcgtcttctcatgcatgggcgccgcgtacgggaccgcgaagagcggcgtcggcgtggcgtcgatgggtgtgatgcggccggagctcgtcatgaagtccatcgtgcccgtggtcatggctggtgtgctcggtatctagggtcatcatcgcc

SEQ ID NO: 3922 - DNA, 286 bp, Zea mays
  misc_feature: Incyte ID No: 700454085H1
  unsure 216, 238, 271: a, t, c, g, or other
ggaagaagcatccccaaatatttacttccagaacatatcagtgcctgccacatgcgcataaccttctctgcacataaggatttgaatatcaaatttcagtcgcatcgcagcagggattacaccaatccttaccttcctgtgaaccaaacagcaattgaggggattgtgcagcccactgtaggccctgatgggaagataaaggagcctgagagcaangtacttttagcatcaattgagnacatgcaatatgctgtgacgtggatgttctgcnactgtgttttctgct

SEQ ID NO: 3923 - DNA, 286 bp, Zea mays
  misc_feature: Incyte ID No: 700454086H1
  unsure 60, 63, 87, 135, 158, 180, 192, 203, 219, 232, 255: a, t, c, g, or other
gatcggtcgaatccagcaccccctccagatttgcgtcaccaatcttcttcttcttccgcngcngccgccgctcccccacaaggaggntagctgctatccccaaatcgattcatcaatcatccgtgtccttccatnttcattccagtcggtcgccgcancacggaccgagaacagagcatnacgtcacatcanactaacctaancagctcgtccctcgcngcgtatctgctgnactttcatcaacaccagtctttnctcctcctggattgcatgcccaggcaagaga

SEQ ID NO: 3924 - DNA, 87 bp, Zea mays
  misc_feature: Incyte ID No: 700454087H1
  unsure 21, 63: a, t, c, g, or other
cttccagagccagcgccaggncttgaatggcacctctccctaggatacacggcctgcaggtcnccaggacctggatgacacccgcct

SEQ ID NO: 3925 - DNA, 283 bp, Zea mays
  misc_feature: Incyte ID No: 700454088H1
cttctccccagcatacagtgccagacaggatacccacacattcatggaggtggttcaagaagtccttaggcatggctcagcagatagtgtccgtgctgtcataagagctaacaaaaagagctacagccttgtccagctcattgcagcctcttttgatgtctacaacattttgtgcagcaaaaatatgacaccaaatgggatgcaagattcttcttccaaaggaagaaatggaacaggattccttcatggagctcgtgttggcattgtggtaaacctctcctga

SEQ ID NO: 3926 - DNA, 285 bp, Zea mays
  misc_feature: Incyte ID No: 700454092H1
  unsure 14: a, t, c, g, or other
gtgccacaatattnaaatgacgggagcatcatgagaggaatggcgatgcttagtcaagttgagttgccagtgtccaagcaaaatactgtcgttgttggtgggaatttgattgtaaatggctcagctggatctggagcagcaaccactgtgctgcgacaccagttgtctcctgtttcctctattgagtttatggccacagctggactacgttctgttattggtgggcagatgtttcgtcaaatttcaccacattctacagcaacttctgacttgcctgtttctttg

SEQ ID NO: 3927 - DNA, 61 bp, Zea mays
  misc_feature: Incyte ID No: 700454094H1
  unsure 3, 11, 45, 48, 54, 57, 59: a, t, c, g, or other
tgntatgtcantatggtgataatatcatggcatataatactggcncangttcanttngnag

SEQ ID NO: 3928 - DNA, 292 bp, Zea mays
  misc_feature: Incyte ID No: 700454095H1
  unsure 6, 24, 55, 85, 88, 98-99, 104-105, 121, 134, 138, 141, 143, 159, 163,178, 200, 221, 277, 285: a, t, c, g, or other
gttatnttgaccttgaggactggnaaccttttcctagacctctggtttgaaccgnatgtattgcttcctcagttcctcttggacnaantcatttgtgnnacttnnctagtgaaatcatagntcacatataattntatnttnangccaattatcacattngtgnctctatatgtaattnggctttttactgcataggagtngctgtagctttgaatcgaatnaatcttgttatgggatcagactaatcatatggttcatgatgtacactccgacagantggaacgngtcatgg

SEQ ID NO: 3929 - DNA, 208 bp, Zea mays
  misc_feature: Incyte ID No: 700454104H1
  unsure 159, 163, 173, 192, 200-201: a, t, c, g, or other
cgtccgctttcagtaacgacgtcgagcaaggggaggtaaaagttcgtttggcgtgcgccatgtttaagaagttctcttcagaagatatatctggacagaatcaagttaaggcttctgtacaacgaaagattcgggcaaagtatcgctgatgagtacccnagcnttgaaccttngctagatgacttggctccnaaaaaatnncctatgt

SEQ ID NO: 3930 - DNA, 265 bp, Zea mays
  misc_feature: Incyte ID No: 700454105H1
  unsure 188, 255: a, t, c, g, or other
tcctcctctgtctcatcggggacccctgtccctcgtggcgacggccggtcgaccgccgctgccgaggacttcgccggcgacgaccacccccacgcccactacattatatgttgaagaatggcttggagctaacagtactgacaccaacttttggttatgatcagaagcgactggagtgcagtaatgantctctaattgtttgcaatataagaaccagatactcattcaaatggttttccatgttacagttggtanccaaaaacaa

SEQ ID NO: 3931 - DNA, 266 bp, Zea mays
  misc_feature: Incyte ID No: 700454106H1
  unsure 201, 211, 234, 244-245: a, t, c, g, or other
ggcaggtcaatacttcgtcattaatttgtacccgatttcttgtcattcatttcataaaaacatgtagttttgatgtatttggtcataactaacaattatctatccttctgaactaaactagtatcacagggtcaaatgtacagaattgttaatataatagtattatcttatttagtgtatgtgaaagggaaatgtgccctngggccatttntaagtattttggtgattaagtgnccaacacaannggttgtgtgtaaaactaggac

SEQ ID NO: 3932 - DNA, 266 bp, Zea mays
  misc_feature: Incyte ID No: 700454107H1
  unsure 131: a, t, c, g, or other
agaattcatgcttgttttcgagaacaatcgggaggctataaataaaatgcctagatcacttttatcagcttttgacaacagatcatggattcctgttacaaacatactttcccggttctgcaaaggctcangatttgcttcctataagaatggtgaatccccatcatctgcaacttttcaggttctactgagggagacatgtattcatgaacaagagctgttcttttcctttcttaatcgacttttcaatacactcagctggacaa

SEQ ID NO: 3933 - DNA, 268 bp, Zea mays
  misc_feature: Incyte ID No: 700454111H1
  unsure 189, 192, 196, 231: a, t, c, g, or other
ggggcagccaagaggtcgtgtgcgcgtggatctctccgtagaagggatgaagatcacggcgctccttgtgctgaagccgtcgacctctggagccggcagctcctcgtccggcggccagtcgggcccggaggcggtcgtgctcgcgaacgcgacggacgtcagccacttcggctacttccagcgcaggcngcncgcnagttcatacgttcttcgttgcccgcaccgtcgctnagcgcacccagccaggccagcggcagtccgttccaac

SEQ ID NO: 3934 - DNA, 266 bp, Zea mays
  misc_feature: Incyte ID No: 700454112H1
  unsure 166, 187, 189, 196, 208, 224, 240, 245-246, 249-250, 264-265: a, t, c, g, or other
ggaagcgcgccccttggaggagggtctcgctgaggccatcgatgacggccgtattggcccacgtgatgatccgaaggtgcgctcccagatcctctctcaggagtttgggtgggacaaggacctggccaagaagatttggtgttttggacctgagaccactggcccnaacatggttgtagatatgtgnangggagtncagtatctcaangaaatcaaggattctnttgtggctggtttccngtggnncannaaaggagggtgcannc

SEQ ID NO: 3935 - DNA, 267 bp, Zea mays
  misc_feature: Incyte ID No: 700454113H1
  unsure 78, 116, 170, 229, 240, 242, 261, 264-265: a, t, c, g, or other
aaacacaagcctcagatctcagtcacctgcgccgccgcttcgttcgtgtggaggggagaatgaggaaatggcggcgancgagggcgtgctcctggggatgggcaaccccctcctcnacatctccgctgtcgtcgatgacgccttcctgacaaagtatgacatcaagctgnacaatgctattctcgctgaggagaagcattgcctatgtatgacgagttggctagcaaanagcaatgttgnantatatcgccggagaagccnccnnct

SEQ ID NO: 3936 - DNA, 272 bp, Zea mays
  misc_feature: Incyte ID No: 700454114H1
  unsure 105-106, 174, 184, 187, 204-205, 232, 240, 261, 269: a, t, c, g, or other
caggcgtgcgagctcgggaatcaggggtttcacacatagcttcgtcgatttgaatttgatgtactaatggagtctaagggtggcaaaaagtctagcagtagtcgnntccatgatgtatgaagctccccttggctacagcattgaggacgttcgacctgccggagggtgaaagangttccagtcngcngcttactccaactgcgnnaagaagcccattcctgatatccctttnggcttccncattctagtaggttaggattncttttctnaca

SEQ ID NO: 3937 - DNA, 276 bp, Zea mays
  misc_feature: Incyte ID No: 700454116H1
  unsure 43, 78, 98, 104, 108, 246, 272: a, t, c, g, or other
gtctcgcctctcccttggttcctcgcggcgacgactgggcgancgcctcctcccctccctcactccctccgtgagctncctcgccggcggcgcgcgcngccgcncgtngccacgtcttctccgctgacgtgggctcaccaggttcaaggcaatatctgtgttaatcttggggacttcagtagattgctgagagttctcccttgatacaggggaataaagatccaaataagtttttgacattgatcngtagccagtactgcaatggctaacgnagtt

SEQ ID NO: 3938 - DNA, 266 bp, Zea mays
  misc_feature: Incyte ID No: 700454117H1
  unsure 36, 53, 184, 193, 205, 218, 253: a, t, c, g, or other
ggacaccaccgagaggaactctctggtcctgctcgnggtggtcgtcgtcatcncttcccgggcctgagaactgtgactgtagactacaattgcatcctgaagaataaaatggaccaacatgattccatggctgactcaccaaggaggcggcacaaccttttgcgtgacaaaggtccaattggtnaaaaggaangattcagatcgntatgagatcgtcngcttccatgatccatgttctttgagaaaggctctngttgtgatccgtc

SEQ ID NO: 3939 - DNA, 122 bp, Zea mays
  misc_feature: Incyte ID No: 700454118H1
  unsure 13, 18, 23, 55, 63, 69, 80, 85, 96-98, 114, 117, 119: a, t, c, g, or other
gcggctgcttgcnccccncatcnactagcctgtgacactggttggagtggttgcncagtggtnctcacnaagctgctacntactngataccactcnnnacccctgtgggccatnggngnggc

SEQ ID NO: 3940 - DNA, 272 bp, Zea mays
  misc_feature: Incyte ID No: 700454119H1
  unsure 154, 207, 259: a, t, c, g, or other
ggagaggagaggaacagagccaagaaacaagcccggaagatggcaggcggcggagtggtgaagcacatcctgctggcaagcttcaaggaggaggtgacgcaggagcgcctggacgagctcatccgaggatacgccgcgctcgttcggcgtggtncccctccatgaaggcgttccactggggaactgatgtgagcatagaaaacatgnatcaagggttcacgcacgtcttcgagtccacgtttgaaagccacggaaaggnattcaaggagtat

SEQ ID NO: 3941 - DNA, 266 bp, Zea mays
  misc_feature: Incyte ID No: 700454121H1
  unsure 21, 52, 54, 66, 88, 91, 109, 134, 167, 180, 194, 203, 215, 255, 258, 264: a, t, c, g, or other
catcctcctgcacggcagggngcagccacacttgttggttcctctccctctncnctctcccgtgtngcggcgggggatatcatctatnatngggtggctgcggctccantccctcttctcccctctccggaggntgtgggtgagggcgcattcccgaccgccggaancggagggggatgngcatcctgtacaangacgtgcantcctgccaggangaggacgtgcgcgtgctctggtccatcctcatcgactccnacngccagnac

SEQ ID NO: 3942 - DNA, 262 bp, Zea mays
  misc_feature: Incyte ID No: 700454125H1
acagatgtgtgtgtgcagtgtgctagagagtggcgataagagtctgtccagatagccaaggatgacttgcctgtggcttcttggcttgccttggctcgggctgattaaaaccttgtgcacgttttattgctctccccgtggcctcgatcacaggcagtctccttggctagtccgggcaggccccttatctgaaaccgatatatcggtgagcgtgggaccgagggaaagcatatatgcggtgcaggtgcaggcgtgcagctac

SEQ ID NO: 3943 - DNA, 140 bp, Zea mays
  misc_feature: Incyte ID No: 700454126H1
tgataagttggtgtctcagatcctgtaccgaatagaataggaaaaaatgttgtaaaaattacctgtcgtttctacctgtacaagaaatggaaagtgcagttttaagaaaaaaaggagggtgaaagggatctaggtgttct

SEQ ID NO: 3944 - DNA, 267 bp, Zea mays
  misc_feature: Incyte ID No: 700454127H1
  unsure 189, 208, 226: a, t, c, g, or other
acggcattggcgcgttgaccgcacgacctgccgattccttcgagcgatatagggcgcccccgtaccacaccaccccttcgtctccgccctagcgccactgagccactcaacgtcgagatcgagacgacccgagtccgccgcgcccgtgcaccaccgaccgtcgaactcccgaaagtaactctatttctngatcaacatccaacatgtncgcgggaggataatgttnacatggccaagctggctgagcaagcagaacggtacgaggaa

SEQ ID NO: 3945 - DNA, 174 bp, Zea mays
  misc_feature: Incyte ID No: 700454128H1
  unsure 131, 133, 168: a, t, c, g, or other
cgccgaccgcacaccggcagcacgggactacgggagcagccgaggcccgaccgcccgagaaattcaagataaaagattttgaagcattttcaagtcttaagaactcggaagataaatttaccttgcatcancncctccatgaacgagaagcatgcagtcgtgtaagtncctgcg

SEQ ID NO: 3946 - DNA, 266 bp, Zea mays
  misc_feature: Incyte ID No: 700454130H1
  unsure 222: a, t, c, g, or other
gtgccatatacatcgagctgtactacatctttgctagtgtttggggccacaggatttacacaatctacagcattctgtttattgtctttatcatcctccttatcgtcactgcattcatcacagttgcactgacatacttccagcttgctgctgaggaccatgagtggtggtggaggtcattcctatgcggaggatcaactggatttttcgtatacggctacngcctgtactactactatgcgcgatcggatatgtctggcttcatg

SEQ ID NO: 3947 - DNA, 260 bp, Zea mays
  misc_feature: Incyte ID No: 700454131H1
  unsure 50, 232: a, t, c, g, or other
cttcggagcaacgtacaaagctgaggtagcaccaggaaaattggtggcantaaagagacttgctattggaaggttccaaggcattcagcaattccaagcagaggtcaaaacacttgggaggtgtcgccattccaatcttgtaacactcataggataccatctcagcgattcagagatgtttctaatatatacttttctgcctggtggcaatttagaaagattcatacaaganaggactaagagaccattgattggagatg

SEQ ID NO: 3948 - DNA, 171 bp, Zea mays
  misc_feature: Incyte ID No: 700454133H1
  unsure 30, 155, 169: a, t, c, g, or other
gcaaaaggaacataaggatagaggagaganataaacaatggggaagggagatgtggctaccaggtcaaaatctcaaaaatcaccagcaatacagaatgagcagagtacacctgctaacccgcccacagctatcctgattggtctcagttccaggncatactataatgcngc

SEQ ID NO: 3949 - DNA, 145 bp, Zea mays
  misc_feature: Incyte ID No: 700454134H1
  unsure 53, 60, 81, 92, 119, 137: a, t, c, g, or other
ccttgcttgactgtgatcgagtctttgttatactcagcatgccttcggttgcnttctcangttgatgcagacacttcaaanggcttttgttnaagaggtgatggaacttgttgagttgnatccccttaagcggcgcncttgttgg

SEQ ID NO: 3950 - DNA, 101 bp, Zea mays
  misc_feature: Incyte ID No: 700454135H1
  unsure 23, 32, 39, 58, 80, 88, 99: a, t, c, g, or other
cctcggcgccgccatacgtctancaacaggtncccacgncatggaacgaccactggantcttctggagttggcccccttncattcggncatgatgcttncg

SEQ ID NO: 3951 - DNA, 257 bp, Zea mays
  misc_feature: Incyte ID No: 700454136H1
  unsure 67, 98, 107, 146, 174, 183, 216, 224, 233, 235, 237, 249, 252: a, t, c, g, or other
gtgctgcaaattctatatagctctgtcgcagcatggcctcggtgggcgtggcacgctcttctttggnatttcagaatggcacaagttctagcagtganccagatcgncttcccaacgagttgggcagtatgagcataagggacganaaggacgttgaagatattgtagtcaatngcaatgggncggactgatccatatcatagtgaccaccattgntgggatanatgggcagncnangcagaccatatnacnggggg

SEQ ID NO: 3952 - DNA, 265 bp, Zea mays
  misc_feature: Incyte ID No: 700454137H1
  unsure 25, 29, 156, 158, 165, 172, 175, 185-186, 220, 222, 224, 237, 242: a, t, c, g, or other
atggcccgcacgaagcagacggcgnggangtccactggcggcaaggcgccaaggaagcagctggccaccaaggcggcgcgcaagtttgcgcccggcgaccggcggagttaagaagccccaccgtttccgccccggcaccgtcgcgttccgggagancngcaagtncccagangancacggagttnntgatccgcaagctgccgttccagcgcctggtgcntnanatcgccccagganttcangaccgacttcgttccagagctcc

SEQ ID NO: 3953 - DNA, 268 bp, Zea mays
  misc_feature: Incyte ID No: 700454139H1
  unsure 45, 73, 86, 155, 157, 164, 188-189, 191, 223, 228, 231, 236, 238, 255,257: a, t, c, g, or other
agaattcatgcttgttttcgagaacaatcgggaggctataaatanaatgcctagatcacttttatcagctttngacaacagatcanggattcctgttacaaacatactttcccggttctgcaaaggctcaggatttgcttcctataagaatggtnantccccancatctgcaacttttcaggttctanntnagggagacatgtattcatgaacaagagctgtnctttnccnttctnantcgacttttccaatacncncagctggacat

SEQ ID NO: 3954 - DNA, 263 bp, Zea mays
  misc_feature: Incyte ID No: 700454141H1
  unsure 89, 97-98, 114, 153, 169, 179, 190-191, 194, 198, 253, 260: a, t, c, g, or other
atccgccccgaggttccaaaccctagctttctctcatcctccacgaaccctagatccaaaatctaacacacgtgcatcctcttattatngccgtgcnngacgcttctctctgcngtcgattcagccgcggaccgcccggttcacttccctttnctcccgagatctcgantctcgagcangtatgggtganncgnaggncaacgaggtgtacgaggaggacctagtcgactatgaggaggaggtggagaatgtnattgatngcc

SEQ ID NO: 3955 - DNA, 130 bp, Zea mays
  misc_feature: Incyte ID No: 700454142H1
  unsure 2, 17, 50, 59, 65, 77, 79, 87, 95, 99, 104, 128: a, t, c, g, or other
gntgagttaccacgtcntgtctatgtctctcgtgaaaagagaccaggctntcagcatcncaaganggctggtgcaangnatgcgctnattcgtgnatcngctgngctgacaaatggtgcctatcttcnca

SEQ ID NO: 3956 - DNA, 114 bp, Zea mays
  misc_feature: Incyte ID No: 700454144H1
  unsure 31, 41, 48, 62, 65, 68, 87: a, t, c, g, or other
ctcttgtcggtcgtccctccagctcgccgtngcaccgcatncgcattntgaccgatttcganagnttntctagctacgccaggggancatggcgaagatactaacgccaaaccg

SEQ ID NO: 3957 - DNA, 152 bp, Zea mays
  misc_feature: Incyte ID No: 700454145H1
  unsure 37: a, t, c, g, or other
cctccacccaatcgaaggacctagcgagcggcagcgncggcggcgatcggagaagatggtgcgcaaggcgaaggttgagttcgacgagcagccgccggataacttcgacccgaagaacccgtatgccgacccggtggcgatgctcgaatacc

SEQ ID NO: 3958 - DNA, 261 bp, Zea mays
  misc_feature: Incyte ID No: 700454147H1
  unsure 34, 47, 95, 157, 227, 230, 253: a, t, c, g, or other
cttcgcaacggtgccgcggcttcggacagggctntcgcgacgcgatncggacatggcggcgtctctgcgggcctcgtcctccctccgctcgcgcntcctctcgttctcctcggggtgttctctgtgtccgtggcgtctcctcctctcctcacctgtnccactcggacgccccccaccagaccgaaaccctcgctttcgacgagatccagctgtcgccggagaaagcnggntaccgccactgccttcgtcctgnacggcttc

SEQ ID NO: 3959 - DNA, 130 bp, Zea mays
  misc_feature: Incyte ID No: 700454148H1
  unsure 23, 29, 40, 43, 57, 86, 92, 101, 114, 117: a, t, c, g, or other
gttcccttcctcctctcttttcnccaccnctccctttctnggngtctacccggcgcnatcaggaccgaatcctaaggccgccggcngccgcngctgcagcntactccggttggnaangagtttggagtaa

SEQ ID NO: 3960 - DNA, 105 bp, Zea mays
  misc_feature: Incyte ID No: 700454151H1
  unsure 42, 58, 74, 95: a, t, c, g, or other
gggagagtccgtagctgacttcatccgtggcatgatcttganatcggtcctgatgctncctgctagtattctcnaatggtgttgttgagatcacnaagtggaagc

SEQ ID NO: 3961 - DNA, 131 bp, Zea mays
  misc_feature: Incyte ID No: 700454153H1
  unsure 4, 16, 47, 71: a, t, c, g, or other
ctcntttggggtttgngcaatatgtggactatgcattagaagtcccncatgtcttttgtgtaccgaaatanaaagtatattgactgcaccggaatgtacgtttcgggattttatgcaaggaaagcttccac

SEQ ID NO: 3962 - DNA, 90 bp, Zea mays
  misc_feature: Incyte ID No: 700454155H1
  unsure 3, 9, 58, 68, 75: a, t, c, g, or other
ggngaagtntgaggggctgtgcaaggtcatcaaggagagttctgggtgacaaagttgnaggaaggtgntgagtgncctagatccacgttg

SEQ ID NO: 3963 - DNA, 96 bp, Zea mays
  misc_feature: Incyte ID No: 700454156H1
  unsure 6, 35, 47, 54, 70, 94: a, t, c, g, or other
cgtggntgacaggcgctaggggatccaagaaggangcactggcgctncttggancgcccctggcacggcngcctttcaggttcacacgttgacncg

SEQ ID NO: 3964 - DNA, 257 bp, Zea mays
  misc_feature: Incyte ID No: 700454157H1
  unsure 9, 44, 66, 107, 119, 126, 129, 132, 136, 139, 175, 177, 207, 213-214,221, 228, 230, 246, 248: a, t, c, g, or other
tggaagcancgttggtttcgtggagaccctagagaatgatcttntggagcttcgaggcaagggtantgatgcacagattgcatctggtggtggaaggatgtatgttnccatggaccgtnatgagantgnctngganctngttaaacgtggctgggatgctcaggtgctcggagangncccctacaaattcaaaagtggcattgaggntgtgannacagtgnacagtanancccaaggctaatgatnantattgcccc

SEQ ID NO: 3965 - DNA, 264 bp, Zea mays
  misc_feature: Incyte ID No: 700454161H1
  unsure 98-99, 166, 170-171, 175, 183, 229, 233, 245: a, t, c, g, or other
gccggcggcaacctgttcgggcgggcgctgagctacgtagtcaacgagctcctcgtcgagggcctcgccaacaaccgtgcattccagaggttcgctgnnaagaccaacaggactcttgagagcctatcgtctaaagctaaggaatgagggaggagttatcggaacnattnnaggnagctcgtncgccagaaagatcacttccaagccagtgaagctggttcccacatgngatncagcaggatgcncactgacaatctgttaggt

SEQ ID NO: 3966 - DNA, 267 bp, Zea mays
  misc_feature: Incyte ID No: 700454164H1
  unsure 170, 185, 217, 263: a, t, c, g, or other
ccgtcatgtcgaagcgaggtaggggaggttcggctgggaacaagttccgcatgtcactgggtctaccggtggcggccacggtgaactgcgcggacaacacgggcgccaagaacctctacatcatctccgtcaagggcatcaagggccgcctcaaccgcctcccgtccgcntgtgtcggcgacatngtcatggccaccgtaaagaagggaaagcccgnctcaggaagaaatgatgcccgcccgtcatcgtccgcccagcgcaantgtg

SEQ ID NO: 3967 - DNA, 119 bp, Zea mays
  misc_feature: Incyte ID No: 700454166H1
  unsure 15, 36, 66, 85, 95, 102, 111: a, t, c, g, or other
catgcctcgtcaggnctagagagtggtggtgctganttcactgagcctgctccacgctggtcacanagctcagagcatacttggncatcagacanatgtganacatatttncgctccat

SEQ ID NO: 3968 - DNA, 272 bp, Zea mays
  misc_feature: Incyte ID No: 700454168H1
  unsure 148-149, 173, 182-183, 197, 214, 238, 265: a, t, c, g, or other
gaaggccccaaaacatcagatcccagtaaatacatacgctatatatacaatagggtgatacttgaaaatgctagcagttcgagctagtgcagtcagcacattgggcaaaatttggtgccttggttgactcactcaagcctcgcatatnngtgcctcctgagacgctgcctgtntgatggaanntgacgaggtgcgcnattagagcgaccctttnacctcaaattgttcaggtgggganagctcacagtggggttgagcacagagnaggatgt

SEQ ID NO: 3969 - DNA, 167 bp, Zea mays
  misc_feature: Incyte ID No: 700454171H1
  unsure 8, 13-14, 23-24, 30, 33, 45, 55, 66, 86-87, 104, 106, 124, 143, 145: a, t, c, g, or other
gttccgcnctcannctgcccgcnntccgcnaanctctgccgcttncacgcacgangattgacgtcntccttcctccggtccgtcanncccgaaacgcagcaggncnagatccgcgcgctcaagncttcaactcgggaggaatnanccggtcttcgacggtctctaca

SEQ ID NO: 3970 - DNA, 256 bp, Zea mays
  misc_feature: Incyte ID No: 700454172H1
  unsure 159, 242: a, t, c, g, or other
ttgcatatacacctccagaatatttaagaaatggaagagtaacatcagaaagtgtcatattcagctttggcactatactgctggacctcctaagtggaaagcgtatacctccttcccgtgctcttgatatgataaaaggcaacaatatccaagtactgntggattcacatttggagggaaactactcaacagatgaggcaaccacattggttgacctggcttcccagtgcctacagtatgancctagggatcgggc

SEQ ID NO: 3971 - DNA, 258 bp, Zea mays
  misc_feature: Incyte ID No: 700454173H1
  unsure 147, 238, 245: a, t, c, g, or other
gcggcggcgcggcacctcagatccggcctccccctcctccgcgcccacctacgcatcctccgaatccgcggccgtcgctcaggtttcgaggggcttcgcgtcgcaggccgccaagcccaccgggaaggagatcaaggttccaaaggntctgtttggcggcacaggcaactatgccagtgcactgttgcctcacagcagctaaatctaatgcattggacaaagttgcattctgacattnaagtatngtagaggctccca

SEQ ID NO: 3972 - DNA, 249 bp, Zea mays
  misc_feature: Incyte ID No: 700454174H1
  unsure 168: a, t, c, g, or other
tgggagatgcatttaatgtctatttggattttaaggagtctggtctaaaggcagatgttgttctgttcagctcttttattgatactttggccaagaatggcttggttgagtgtgctttgtctttgcttgatgagatgatgaagatgggtatcaagccaaatgttgtancctacaacacaatcattgatgcatttggcaagtcgaagatttttactgaggaggattctgcatattggtgcacatgggaat

SEQ ID NO: 3973 - DNA, 234 bp, Zea mays
  misc_feature: Incyte ID No: 700454175H1
  unsure 8, 65, 226, 229, 232: a, t, c, g, or other
atgacacngctgctttcaaaaacttcaataagtggggcaatattgtgtttcccctaccatttggnagagttctcagtccctccgaaagttttatccatgaactggatgagaagacaagtgcttctctgaaattcacggtactgaacccaaaaggacgcatctggacaatggttgccaggtggtggtgctagtgtcatatacgccagacactgttggtgatttgggnctnctncg

SEQ ID NO: 3974 - DNA, 262 bp, Zea mays
  misc_feature: Incyte ID No: 700454178H1
  unsure 163, 224, 226, 254: a, t, c, g, or other
gaagaaagggtttttgttgaaaggcttaaaacttttccagtgccccaaggacttggcgcaggagcattacaaggatttgaaggataaacctttctttcctaagctgatcgattacataacttctggccctgttgtctgcatggcctgggagggtgctggtgtngttgcatcagctcgcaaattaataggagctactaacccccttcaagctgaaccagggactntnacggggtgatcttgcagttcaaactggnaggaacgt

SEQ ID NO: 3975 - DNA, 255 bp, Zea mays
  misc_feature: Incyte ID No: 700454179H1
  unsure 14, 53, 59, 76, 191: a, t, c, g, or other
cttctgcggcaggncatctgatgaaaccctgcatcgtgttctagaaaccctgnaatcancaatcaaatctggtggngaacaatcaactttaattgagcctgtcatttcccccatcatactggatgtttgggcacagcacattgctgacccgttcatcagcattgatgctgtcgaagtgttagaggctatcnagaatgctcctggatgcttacagccattgtgtctcgaatccttccaacaattggatccatttga

SEQ ID NO: 3976 - DNA, 257 bp, Zea mays
  misc_feature: Incyte ID No: 700454186H1
  unsure 70, 77, 98, 110, 118, 121-123, 132, 153, 208, 230: a, t, c, g, or other
gccatcctaagatggactcatggctaggcaaccggaaaaggatcatagtcttgaatcgcaaggacatganctcaacngaggatatgaatgcatgagcnacttactttggnaatcaggncannnaaagttgtnttctccaatggccagctgggnatgggtacaatgaaattaggtaggatggcgaaatcagtagcatctgttgcgaacncaaagagaaaggagaagggatngcttccccatccggttcgagctggaat

SEQ ID NO: 3977 - DNA, 84 bp, Zea mays
  misc_feature: Incyte ID No: 700454187H1
  unsure 10, 23-24, 51, 54: a, t, c, g, or other
gccgcctggntcgcaccgcccgnnggcagtgcctcagtccagattcaagcntancctcttctccagatacgagttcctagttgg

SEQ ID NO: 3978 - DNA, 255 bp, Zea mays
  misc_feature: Incyte ID No: 700454188H1
  unsure 2, 167-188: a, t, c, g, or other
gnccacccaagcttccctttcgttcctcctcgccccagcgacgcggcctcccgtagaccgagcaaggcaacccaccactgagaggcacgcagaggagcaggaagccggagaccaagatgtcgtcggtgttcagcggcgatgagacggcccccttcttcggtttcctnnnnnnnnnnnnnnnnnnnnnnttctcatgcatgggcgcaggtacgggaccgcgaagagcggcgtcggcgtggcgtcgatgggtgtgat

SEQ ID NO: 3979 - DNA, 258 bp, Zea mays
  misc_feature: Incyte ID No: 700454189H1
  unsure 31, 113, 171, 173-175, 217: a, t, c, g, or other
gggaggtgtcaaggaccatccactggtgganactgatgcactcaaaatcattgaggaaaagcttggaagattacctcttggcctaagtattgttggagctatactctcggagnttccaatcactccaactaggctacttgacacattgaatcgtacaccggcacatcaggnannnggtccatggaatgatagagaagttctcagcttgaaaaatcangaaatccttgtccgcctgctggatgtgtgcttatccaatat

SEQ ID NO: 3980 - DNA, 257 bp, Zea mays
  misc_feature: Incyte ID No: 700454190H1
  unsure 231: a, t, c, g, or other
attggcagagctgttgttgttcacgctgatcctgatgatcttggaaagggtgggcacgagctgagcaagagcactggaaacgccggtggccgtgttgcttgtgggatcattggactccagggctgaaaacgatcgccggacttgggggtgcctgagaggtccgtctcctgcgcgtccgccagcagacgagcctgaacattgggagacatcgtgaaataagagcgtcgctgnatctgtgatcatcgtatttgtcatta

SEQ ID NO: 3981 - DNA, 96 bp, Zea mays
  misc_feature: Incyte ID No: 700454193H1
  unsure 12, 18, 24, 39, 50, 61, 81, 86: a, t, c, g, or other
ggagcacgtagncagcgncctggnccgcccctgacaggngcgccctgganaggcccttcgngttcctgcagaggcagaacncaggnatggcttgtt

SEQ ID NO: 3982 - DNA, 145 bp, Zea mays
  misc_feature: Incyte ID No: 700454196H1
tacgccccgcacctcgcttcatttcgtgtcgccaagatgacgaagcgcactaagaaggcaggaattgttggcaaatatggaaccaggtatggtgctagcttgcgtaagcaaatcaagaagatggaggtatctcagcattccaagt

SEQ ID NO: 3983 - DNA, 293 bp, Zea mays
  misc_feature: Incyte ID No: 700454202H1
  unsure 43-44, 102, 155: a, t, c, g, or other
gtcttcacacctttaacagaaccatttatagaggaggaatgcnnagatacactagggctgaaattgttagcaaaagcacgttactctctagcaacctttganggggaggaaattgttattgtgtcgcaggttttggcgcacgaggtcaacattgnatcatgagcacatgggcaatcaacaagtcatgaaactaaacggaaccacaataaagaatatccatcaccttgctcatcttgtggacacctgtaaagacaagttcctgacgttcgaattcgaagacgacttcctgttgt

SEQ ID NO: 3984 - DNA, 290 bp, Zea mays
  misc_feature: Incyte ID No: 700454206H1
  unsure 288: a, t, c, g, or other
caggaatcgacctcacggtaacgtcaccaggtggcaacactgtgtacacattgaagggaaaatctggtgagaaatttgagtttaaagctccaagaggtggcatgtataagttctgcttccataacccatatggagcacctgaaactgtttctttctacatccatgttgggcacatacccaatgagcacaatctggcgaaagatgagcacttggaccctatcaacgttaaaatcgcggactgaaggaagcattagatccatcaccgccgagcagaagtacctaaaagcncg

SEQ ID NO: 3985 - DNA, 288 bp, Zea mays
  misc_feature: Incyte ID No: 700454209H1
  unsure 208, 210-211, 213, 216, 220, 258, 273: a, t, c, g, or other
gcttacttcaacacacgatgtattgagaggtttggttgattggctctgttcacagctgaggaatcctacacacccgagctgctctattcctacttctatccattgcctctccactttgctaagagaaccatatgttaggacattatttgttcaagctgatggcatcaagctgctcattcccttaatttccccagcttccacacaacanannanttnaatncttatgaaacttgcctctgcatctggcttttaatcctntatgatgctgcagtngattattgtccacca

SEQ ID NO: 3986 - DNA, 288 bp, Zea mays
  misc_feature: Incyte ID No: 700454211H1
  unsure 6, 41-42, 58, 230: a, t, c, g, or other
ccagcngccaccttcccgggctcctttactcgccggaggannccagaactcgtgccanctcctcctgttccttgccatctccgaattcccatctgagattccaagggccgcgccgtgcaatcgaggctctccccgctcaccatatatcggaggctccgcccccgcgcctcgaatccttcgcgagaggtgctgttgtttgccgtgatttgagccgggtggaggtgtctcgnttcttgatcttgagaggtgttccagttgattgttgggagcgaaaaggcatgatacctt

SEQ ID NO: 3987 - DNA, 296 bp, Zea mays
  misc_feature: Incyte ID No: 700454212H1
  unsure 15, 279: a, t, c, g, or other
tgtgaataatcctgnatcagtatggtggtgtgtcagaaagccctccaggcaattcagttggatatttctatggatctactccagaaaatcacagttataaaagttcaaagctgagttcatctcctcatggaattcctactgggagctcgcctgttgggtctgtgcccaaatctttctccacaatcttcagcatcttacttttcatctttaggaaaaaataaactccagccgcaaaggtacaataagttcaaaccatcactgccttatggagcgtaaganattaggcactggccaga

SEQ ID NO: 3988 - DNA, 192 bp, Zea mays
  misc_feature: Incyte ID No: 700454213H1
  unsure 59: a, t, c, g, or other
gcttacttcaacacacgatgtattgagaggtttggttgattggctctgttcacagctgnggaatcctacacacccgagctgctctattcctacttctatccattgcctctccactttgctaagagaaccatatgttaggacattatttgttcaagctgatggcatcaagctgctcattccctaatttcccca

SEQ ID NO: 3989 - DNA, 286 bp, Zea mays
  misc_feature: Incyte ID No: 700454219H1
  unsure 147-174: a, t, c, g, or other
ctgatggacatcggcatgatgaccatgacaaaaggacggcagagagatgaaaaagaatggagcgagctcttcaccaaagcagggttcagcgaatacaagatcctgaaggaatttggagctcgtgttgccttcgaagtctatccgtgnnnnnnnnnnnnnnnnnnnnnnnnnnnnatgtatgtgtgtgggtgcctgcgtggcttggcgtgatgatgtcataaataaagagggtgggtgtgcttgcggtattcaggatggccaggatctgagcacatgacgttggatg

SEQ ID NO: 3990 - DNA, 251 bp, Zea mays
  misc_feature: Incyte ID No: 700454221H1
  unsure 53: a, t, c, g, or other
catcctcctgcacggcaggggcagccacacttgttggttcctctccctcttgnctctcccgtgtggcggcgggggatatcatctatgatggggtggctgcggctccactccctcttctcccctctccggaggatgtgggtgagggcgcattccgagcgccggaaccggagggggatgcgcatcctgtacaaggacgtgcagtcctgccaggacgaggacgtgcgcgtgctctggtccatcctcatcgactc

SEQ ID NO: 3991 - DNA, 284 bp, Zea mays
  misc_feature: Incyte ID No: 700454222H1
  unsure 242, 269: a, t, c, g, or other
tgctcttcgatgttacatggctggaactgttggaggaagttttggcttggatgtccaatatttatgcaggctctgtgataacaaaaccaacttaatgacacatgtggagaaactcatggaaacatgccaatctcttgaatctagggaccaaatcaaacctatgctgaatttgggcttatgcctcttgcgtggatcaaaacaaatgagagcaagaaacttggagaaccatatgagatcagcanggaaaagctggatgtggatttgatttngttgaagtctggaaa

SEQ ID NO: 3992 - DNA, 285 bp, Zea mays
  misc_feature: Incyte ID No: 700454223H1
  unsure 71, 150, 154, 222, 255, 276: a, t, c, g, or other
cgtcgcgcgcctcggctacgtctggcagttcatcacgctcgccgggttccacgccgacgcgctacgtcaancgacacgttcgcgcgggacttcgcgcgccgcggcatgctggcctacgtggagaggatccagagggatgagaggatcaanggcntggagacgctggagcatcagaagtggtcgggcgccaatttctacgacagggtgctcaaggctgtgcanggtggcatctcctcgatgcagccatgggcaaangagttatgaagagcattcaangatccacgg

SEQ ID NO: 3993 - DNA, 285 bp, Zea mays
  misc_feature: Incyte ID No: 700454224H1
  unsure 4, 10, 21, 49, 61, 85, 96, 99, 102, 111, 163, 169-170, 173, 183, 193,206, 210, 216, 218, 260: a, t, c, g, or other
ccantgcagnatgtttaatgnagcagttgagtcacagctcataagtcanaaaaccatattntaactcaaagttcaaatatgtatncgtttgccagntanatncgtcggaanataagagctgccaatgccaaagtcaggatgacaatcagtacagctgacccancatgannagngtggttgtcncttggctggnggccctggattanatcnggtgangnagacaacctctctgactctgctgcgggcccggcgctgtcganggctcatggaggtaatctagctaca

SEQ ID NO: 3994 - DNA, 286 bp, Zea mays
  misc_feature: Incyte ID No: 700454225H1
  unsure 153, 189, 216, 224: a, t, c, g, or other
cccaaatccactgtcgcgcgcccttgccgctcaatctccgctcacattcaccaagaagcacttctgtcccccccaccgccccctcaaaaccccctgttggcgctgcatccacgttcacgtcgcttgaggaggtgagcactcggatctagctangtgccgcaagcgagaccatgccatgttccatctccncgcattttctcgtgagcacgctctgcnatcccgcntcctcctagtaacgcgttgctcaaggttatggatctggtgagtcaccgttcagagttgggtt

SEQ ID NO: 3995 - DNA, 205 bp, Zea mays
  misc_feature: Incyte ID No: 700454226H1
gttactgtaggcaatggcttcttgtacaccgttggaagccaggatagaacctgatggtagtagctttgcagtttaattattgcctttggtttcttttgcaagataaatctatgagatgtaatgtggaccttgtttgacccaagttgtttaaactaaaatgcaaaacgatggatgtcttgtgttgatttgcagcagagttcttgca

SEQ ID NO: 3996 - DNA, 290 bp, Zea mays
  misc_feature: Incyte ID No: 700454228H1
gggaccaggtaagcagcagcaggaaccctagcaccgccgcatccgcagccatgggtatcgacctcgttgccggtgggaggaacaagaagaccaagcgcacagcgccgaagtccgacgatgtttatctcaagctccttgtcaagctctaccgtttcttggtcaggaggaccaagagcaacttcaatgctgtcattctcaagaggctcttcatgagcaaaaccaatcgcccaccaatctccatgcgccgcttgtcaagttcatggaaggaaggagaagaacttgctgtgatt

SEQ ID NO: 3997 - DNA, 288 bp, Zea mays
  misc_feature: Incyte ID No: 700454229H1
  unsure 44, 256, 262, 265, 280, 285: a, t, c, g, or other
ctcccagccgtcgaaagtcgaaaccctagccccgcctcaccgcnggcggtggtggcagcctcagcaccggcacacagcccgccgtacctctcctcgtacgctcccttccggtgtgccgtcgccccctcgaccggtccatcgttcgtcggctcggtagccgccggatcggatcgggatcggccggcgccatgtccaaggccagggtctacaccgacgtcaagtgctgcgccccaaggagtatgggactacgaggcgntcaccnttnaatggggtgagaagnataantat

SEQ ID NO: 3998 - DNA, 291 bp, Zea mays
  misc_feature: Incyte ID No: 700454230H1
  unsure 206, 217-238, 262: a, t, c, g, or other
ggagaagggctacttcgtgctcaacgacatgttccgcttcgtcggggaaatccctgcccctaccgctgtagaggcgcagcagaggcggatgctgtagtcctgtctgtggctgccaacggcacatctactcttgctgtggagcctgccacccctgatgaccgtaatgccgtgccacagcaggaacatcatgttgtggaccgatcacnacctcaacctnnnnnnnnnnnnnnnnnnnnnntttacgatccgccgccagaggaantatggatgaggaacaacttgttcctgagg

SEQ ID NO: 3999 - DNA, 292 bp, Zea mays
  misc_feature: Incyte ID No: 700454231H1
  unsure 34, 59, 83, 88, 92, 113, 122, 142, 145, 158, 172-173, 217, 236-237, 255,260, 277-278, 284: a, t, c, g, or other
attggagatggcggcgaatctagaggacgtgccncctctggatctgatgcacgaactgntccgtccggatgaagtgcagctcnaagcncganaagcacctcatcctcatcggnccacctggntctggaaagggtactcagtntcnccttattaaggangaatattgcctgtnncatttagccactggtgatatgttgagggctgctgtggcagccangacaatctaggtatcaaanntaaagaagctatggatanggganagcttgtttcagataannggttgnggggatat

SEQ ID NO: 4000 - DNA, 297 bp, Zea mays
  misc_feature: Incyte ID No: 700454232H1
  unsure 214, 236, 291: a, t, c, g, or other
ctggctcaggaacctcagtctcctctcatatctttctgctggaggcgtgatcgcgacgatcacggtcatcgtctgcctatgctgggttggcatcggagaaggaattgggtttcgcttttccggtgctgtagtgaacgtgacccaccttccagtggcactcggcctgtatgggtactgctacttcaggacactcggtgttcccaaacatctactncgtccatgaaggagcgctcgantttccattcgtgctccatgttctgcttcacggtggtaacgttgtgtacgccgganttgcgt

SEQ ID NO: 4001 - DNA, 286 bp, Zea mays
  misc_feature: Incyte ID No: 700454238H1
  unsure 47, 112: a, t, c, g, or other
caagcaggggaagatgtcagacgcgctgatcaacggcctcgccggcnccggcggcgggatcatcgcccagctccttacctacccgctccagaccgtgaacgcgcggcaacanacggagcgcgacccctccaagccggcgttcaaggacggcgccgctcgccagttgtatctggttgtgaagaacgaggggtgggagcgcctgtatggcgggcttatgccctctctcgtcggcaccgctgcctcccagggtgtctactactacttctaccaaatattccggaacagg

SEQ ID NO: 4002 - DNA, 283 bp, Zea mays
  misc_feature: Incyte ID No: 700454239H1
  unsure 182: a, t, c, g, or other
gtttgcttcaagcatggaccagggaatgaattagatacctattcttgaccccttcccgcccaaggaggagcaggcaggaactccggtatatggtggtaattggtggcacctttatgtacttctttaggggcagcctaccatggcaggggctgaaagcaggatcaagaagcagaaatatgacnaaaattagtgcgaaatggatactcccatggaggataccagttttgactggaccattttgaagtatcctcagataggctgcaacctgcggatgaaggcaatg

SEQ ID NO: 4003 - DNA, 282 bp, Zea mays
  misc_feature: Incyte ID No: 700454241H1
  unsure 75, 120, 204, 210, 224: a, t, c, g, or other
caccaacaaagttaagtggggaggccagagctgcccagctgggtcgctgttctaccagagggatggacgggagcnccggctccttcgtcgccgtccgccggctctccggctccgaccgcnccgccgccttccaccactcctcttcggcggaggtcgtgacggggtcgacggcgtggatcgggagggggctctcctgcgtctgcncgcaangagggacagcgatncgcgcctttccttcgattgacgcctgtgcaggaagaatgctacagaggttacaaaacc

SEQ ID NO: 4004 - DNA, 282 bp, Zea mays
  misc_feature: Incyte ID No: 700454242H1
  unsure 201, 210, 236, 247, 251, 268: a, t, c, g, or other
gccacggggcacctttcggggctgacgggcgtgtcggtgtgggaggcgctggtgctggagatcgtgatgaccttcgggctggtgtacacggtgtacgccacggcggtggacccgaagaagggcagcctgggcaccatcgcccccattgccatcggcttcatcgtgggggccaacatcctggtgggcggcgccttcgacggngcgtccatnaaccccgccgtgtccttcggtcccgncctcgtcagtnggantggggctaccatgggtntatgggtcgggccc

SEQ ID NO: 4005 - DNA, 282 bp, Zea mays
  misc_feature: Incyte ID No: 700454243H1
  unsure 8, 40, 67, 86, 173, 235, 273: a, t, c, g, or other
cggaaatnacgacgcggcgcgcttctccctccgtcccgcncgcgctatccccacgttgaggctcggnggccaccgcgacgcccgtngcgctgtcgtcgtccgcgccactgcggcagagggagccgtggagctgcaggccaaggtgacgagcaagtgcttcttcgacgtggagntcggcggggagcctgcgggccgtatcgtcatcgggctcttcggagaggtcgtacctaagacngtcgacaattccgtgcgctctgcactggtgagaaaggntaggctata

SEQ ID NO: 4006 - DNA, 283 bp, Zea mays
  misc_feature: Incyte ID No: 700454244H1
  unsure 42, 121, 157, 175, 199, 204, 249: a, t, c, g, or other
ccaccaccgccggccgggaagcaagctcaaaccctaatcgcngtccgccggcgacgccagcacgatggcccgctacgaccgcgccatcaccgttttctcccccgacggccacctcttccangtggagtacgctctcgaggccgtccgcaagggcaangccgccgtggggtccgcngcacggacaccgtcgtcctcggcntcganaagaagtccacacccaagctccaggactccaggtccgtgcgcaanatcgcgtgcctagacatcacatagtctggctgcg

SEQ ID NO: 4007 - DNA, 112 bp, Zea mays
  misc_feature: Incyte ID No: 700454246H1
  unsure 9, 24, 64, 90, 93: a, t, c, g, or other
gcagccgcngcccgctcgctcgcntccgctccggcagcgagctcttatctcccgcgacgagcancagctgccaccgacgcacgcagagcnggncaataaatattggtattgg

SEQ ID NO: 4008 - DNA, 283 bp, Zea mays
  misc_feature: Incyte ID No: 700454248H1
tcaagttttagggaccttgatgaacacagcaaaaatgtcctcagaagattgtattatgactattattttgttcgccaagaaaatctctggcgccaaaatgcactgaagactttgcctgtccctgctgaactcgtcagatatgttagcatgtggagaggaccttggccttatccctgcttgtgttcaccctgttatgcaagaactggggttgattggattgcgtatccaaagaatgcctagtgaaccaaacttggatttggtattcctctcagtatagctatat

SEQ ID NO: 4009 - DNA, 285 bp, Zea mays
  misc_feature: Incyte ID No: 700454252H1
  unsure 68, 135, 154, 192: a, t, c, g, or other
tggcagagcaggcggagggtacgaggagatggtcgagttcatggagcgcgtcgcgcgctccgccggcngcgccggcgtagggggaggagctatccgtggaggagcgcaacctgctgtccgtcgcctacaagaacntcatcggcgcccgcagggntcagatgcggatcatctcctccatcgagcagaaggagnagggccgcgggaacgaggcgcacgccgcctccatccgcgcctacgctccaagatcgagaccgagtcgccccgcatctgcgatggcatcctcgc

SEQ ID NO: 4010 - DNA, 280 bp, Zea mays
  misc_feature: Incyte ID No: 700454256H1
gccggggtggcatcgaggacatcaagtacgtcggcagggccccgtcggctgctaccgcgacgggcttctactcggtgcacgtgcaggagcagacggagctggtgcagaaggcgctgcagcggaccccctcaactaccctttctgaaagaaacgaggcccctgtagattcttggaattggggaccttttgaatttgatataataccaatatagagagaacatgcctaaattttatctgtgcagccatttggtgaaataattgtttcgactctgcagtaccg

SEQ ID NO: 4011 - DNA, 278 bp, Zea mays
  misc_feature: Incyte ID No: 700454259H1
  unsure 79-80, 144: a, t, c, g, or other
catcttcctcgcagcgccggcgctccatctcccgctcccttccttactcgcgctcggcacacaggcggcggcgctcggnntcgggctctcagggacggcgtcagggcttaccctcgcgccctcgcctccggtcctccgcacacnggccggtgaccctgcgacaacattgcatctgaactgcattggatcctaagagatgatggatgagtcttttcttgataggatggtttcccaattcggtcaacatgcaagtactacatggatatcccaaggattag

SEQ ID NO: 4012 - DNA, 289 bp, Zea mays
  misc_feature: Incyte ID No: 700454262H1
  unsure 45, 98, 107, 152, 203, 208, 211, 219, 276, 285: a, t, c, g, or other
attgacttgttgattgatagattaactgctttagttagatttggnggggcatcatctgattggatccttcctttacattcactgcttggaccctctgntcatagganagtgttccagtctccaccagataacttccgcaaggttattattgncacagacataagcagagaccagcattacaatagatgatgtcgtatatgtanttganacnagaaagcnacaggagaaccgttataatcaaacacaagaaatgtcaagcatagtagaagattgganttctcgtgnaatg

SEQ ID NO: 4013 - DNA, 291 bp, Zea mays
  misc_feature: Incyte ID No: 700454264H1
  unsure 160: a, t, c, g, or other
cggtcctctcccgggcgtcttctccctccgcaccgcggctccggcgatgggcgggcgtcggctccgcgctgcgtcggctctacctctccgtctacaactgggtcgtcttcttcggatgggcgcaggtgctgtactacgcggtcctgacgctgcgtttgancgggcacaaggccgtctatgccgccgtcgagaggccgctgcattcgcgcagacagccgccatcatggagatcgttcatgggtcgtagggttggtgaagtctccggtctctgcaactcttccacagatggat

SEQ ID NO: 4014 - DNA, 282 bp, Zea mays
  misc_feature: Incyte ID No: 700454267H1
  unsure 41, 47-49, 93, 142, 221: a, t, c, g, or other
gcttctagaaccaggtttctaaccctaccgcagaatgatgntttctnnntacctagtagcctggggcggaggcatggacggcggcggggaggngggctcgagcggcgggaggttccctattctgcaggcgaacagggacccngagtcgaattgggaggtggacgttgccaagagccttcgaggattacctgctcaagatctgctcaggggaggtctccggngaggacggggcccactctgtcaactttgccgaacggcgttattactccaaggatcggttca

SEQ ID NO: 4015 - DNA, 282 bp, Zea mays
  misc_feature: Incyte ID No: 700454268H1
  unsure 72, 124, 143, 152: a, t, c, g, or other
ccggcaaccgcgtccggccgtccgcttccgtttccttggataaccacgacgcccgccggcaagcgaaagcgnagcagaccaacccagccatggagaaggcgatcgatcggcagcgggtcctccncgcgcacctcctcccctcnccctccgcngcctcctcgcagcctcagcttgcggcgtcggcgtgcgcggccggggacagcgccgctaaccagaggtcctctccttcggggacgatgtcgtcgtcgtcgctggctacaggacgccgatatgcaaggccaa

SEQ ID NO: 4016 - DNA, 103 bp, Zea mays
  misc_feature: Incyte ID No: 700454270H1
  unsure 32, 63, 69, 75, 85: a, t, c, g, or other
gccaaggcgcggcgcaccaggagtaagcaganagttgcactaccgtgcttcttcagttcttcntcctantatgcnctcgcttgtnacgcgtggcaatggctac

SEQ ID NO: 4017 - DNA, 277 bp, Zea mays
  misc_feature: Incyte ID No: 700454271H1
  unsure 209: a, t, c, g, or other
ggaaagtttaatctctgtatattgccttatgatatcaaacatggctagaccgggaatggatctatacatgatgacgggcatagctagcaagcttacttcaaggttccttaaaaaattttggttcacctttatttgatatggggaaagacatgagagggtgtacagctttttcctgaagcttgcagaacccccctctgtaccatgatcantatacttcacttgtgagtagattagttctaattgatgataataaattgattctttgattgggaaaaaa

SEQ ID NO: 4018 - DNA, 278 bp, Zea mays
  misc_feature: Incyte ID No: 700454272H1
  unsure 184: a, t, c, g, or other
ctcatggagagcacagacgaaattaagaaaaggttggcagccaaagaagttgaggtgcaggagtcgaagagcaccctcgacgccaagctcacgacgattgggaacatcgtgcatgagtccgtgccagtcagcgacgacgaggcaaacaataaaattgtacggacatttggagaaaagagagtancggaaaatttgaagaatcacgtggacctttgcaggatgcttgacttgtcgcttggagaagggtgctgatgtggctggtggtaggggtttctatt

SEQ ID NO: 4019 - DNA, 279 bp, Zea mays
  misc_feature: Incyte ID No: 700454274H1
  unsure 11, 16, 21, 46-47, 54, 58-59, 63, 78, 97, 101, 121, 139, 144, 160, 163,167, 199, 269: a, t, c, g, or other
gcgtgtttganactancggancgaccttgaagttgaagttgaaaanngccggcntgcnncggngatggatgtcaagtnccggcgtctggaggggaangtgnccatcgtgacggcgtccacnatggggatcggcctcgcnatcgncgagcgcctcggtctnganggcnccgccgtcgtcatctcctcccgcaagcagaanaacgtgaacgaggcggtggaggggctcagggccaagggtatcaccgcggttggtgccgtctgccacgtcnccgacgcaca

SEQ ID NO: 4020 - DNA, 266 bp, Zea mays
  misc_feature: Incyte ID No: 700454276H1
  unsure 52, 168-169, 201, 208, 239, 243, 245: a, t, c, g, or other
cagctgggttggatgtgatgtctgctcccattggtgccatgctgcatgcgcnctagagaagaacttgataaggccaggtccgacattgaagggggcgatgggcacgaccgagatgcagttccagtgcctcggctgcaaccatgcttctgagatgtttgggtttgttanngaggtgttcaattgctgtgctcagaactggantgctganacacagattaaagacctggatttgttaggangatntngctgtagtgaggatcctgggg

SEQ ID NO: 4021 - DNA, 276 bp, Zea mays
  misc_feature: Incyte ID No: 700454277H1
  unsure 20, 43, 137, 229, 268: a, t, c, g, or other
atacggcaagaatccaaggnggtgcgtgatccgcggctcccanccgcgctgctgagcccggcagaacatcaggaacgtgtttgcatagtacgagttgaggcccataagcacgtgccaccacgcgtgcccctgcgggntgacgtaccaatgcgaaagttcttgcagaagacgcgatcaaccagccagcagagggtcccaagggtcatgtaaggacccacattttgcgagncgttcgcacccagttttcgtctgtaagtagtattgtacntcggggga

SEQ ID NO: 4022 - DNA, 285 bp, Zea mays
  misc_feature: Incyte ID No: 700454278H1
caggatggtacttctgggttggtgctgaagcgaaaagagccagagtcaggttgggatttgtacccacgtcgttgagcgtgagcctgaaggtttgttgcagtcgcaatcgattttgtcccactctcttaaaaaggatatgttcaatgctccgtttatggcggcaccttggacattgtattttagggtatttctttggcacgggcccagttctactaggtctgaagacatacacggagaactgaataagagatcagctacaggtagatttgacagatgttgacatgg

SEQ ID NO: 4023 - DNA, 276 bp, Zea mays
  misc_feature: Incyte ID No: 700454283H1
  unsure 249: a, t, c, g, or other
ggaaggaagaaggatcgggctcccccgttgcctggcttgacgagcagccagcgcggtctgtggtgtacgtcgcgttcggcaaccgctgcgccgtgagccatgaccagatcagggagatcgccgccgggctggaggcgagcaactgtcggttcctttgggtgctcaagtaccacaatggtggatagggacgacagcgccgtgctgacggaattgctcggcgaggggttcctggagcgagtgcaggtcgcngcctcgtgaccaagcgtgggtggacca

SEQ ID NO: 4024 - DNA, 278 bp, Zea mays
  misc_feature: Incyte ID No: 700454284H1
ggccaggtctccctctccccggctctccgccttcctcttccagtccccgcgcgcgagatcgccgccccgtgtgggccctagatcccgatggcctcgcgccgccgcaccctgctcaaggtcatcatcctcggcgatagtggggttgggaagacttccttgatgaaccaatatgtgaacaagaagttcagcaatcagtacaaggctacgatcggcgcggatttcctcaccaaggaggtgcagttcgaggacaggctcttcactctgcaatatgggacact

SEQ ID NO: 4025 - DNA, 278 bp, Zea mays
  misc_feature: Incyte ID No: 700454285H1
gaaggccccaaaacatcagatcccagtaaatacatacgctatatatacaatagggtgatacttgaaaatgctacagttcgagctagtgcagtcagcacattggcaaaatttggtgccttggttgactcactcaagcctcgcatatttgtgctcctgagacgctgcctgtttgatggagatgacgaggtgcgcgatagagcgaccctttacctcaaattgttaggtggggaagctacagtgggtgagacagagaaggatgtgaatgagtttctcttcgg

SEQ ID NO: 4026 - DNA, 276 bp, Zea mays
  misc_feature: Incyte ID No: 700454286H1
  unsure 174: a, t, c, g, or other
ggatcattagcaccacgaaataattcaatggcaggcattccgtctgcaggggttcaacaacccagtggtggcatttccagtggccgtttccctccaaataatcttcaagcttccttgtctcagattcctcatgggcattctgggattagcaacagaggaggtatgaatgttggncgaaatcctggatttggtagtagcatgaatgctattggtggttcaatacaaggtttatcctcaaacttggctaatgtgggtaaccgcaattctgctcctggg

SEQ ID NO: 4027 - DNA, 277 bp, Zea mays
  misc_feature: Incyte ID No: 700454288H1
actagaaccccccctctcgtcgagagagtcgtccccccgcgtgctctccgcctgcggcctctgtatcccgcaaccaaaaactacccccaaaaaaagaagaaaaccccaaatcctcgagatctatcagtatcgagcgacttaccaatccgattgctagggtttagtttcgaaaaaatctgaaaaaaaattctggtcgaggggaggaggcgatgtcggcgcaagtggcggtggtgcctaatgggggcccgggcgtgtccccgcggtggtgtcgccggga

SEQ ID NO: 4028 - DNA, 276 bp, Zea mays
  misc_feature: Incyte ID No: 700454289H1
gggggagtctggtgatgaactccgttatctgccagtctatgaggaaacatacaagagcttgaaatcaagaggagtgcggtttcctggacgtgacaatgagagcttggctcctatatttactcccgcgcgatcagttgctgaagctgatgttgatgcaagcttgccccagcaggtgttcgaggacgtccatgttcatacatatactgctgaagaaacaaaagaagcatttgatgtagctcgtaacagcgtagaacttctttcaactgttctttcctc

SEQ ID NO: 4029 - DNA, 277 bp, Zea mays
  misc_feature: Incyte ID No: 700454293H1
caggaatgaaggttttagatgtgggctgtggaataggtggaccgctgagagaaattgcaagatttagctcaacttcagttacgggattgaataacaacgaataccagataaccaggggaaaggttatttgaatccacatttgttaatcgacacctttcactgttataatacttatcatgttgctcatatgctaacatgatgtttcaacattcaggagctcaaccgtttagcaggaattagtggaacatgtgatttgtcaggcagacttcatgaagtg

SEQ ID NO: 4030 - DNA, 286 bp, Zea mays
  misc_feature: Incyte ID No: 700454295H1
  unsure 30, 45-47, 126, 130, 137, 139, 142, 153, 169, 174, 190, 217, 221-222,229, 237, 245, 253, 277: a, t, c, g, or other
tcttcctcggacattcgaaggtcttgaacnaagtttccatgaagnnnttattttgctatccaaggaactacaggaggcagaggatgctgaaaattctagacacatggagagattgaaggatataantacncagtacnanganagactattaanacttagagctcggcangcganctatgagagatgagtncctgcgcaggaatctctagcacgccancagnnataccancacgcccngatgagcnattatgcnagcaattccacggctggggagcancatggttac

SEQ ID NO: 4031 - DNA, 275 bp, Zea mays
  misc_feature: Incyte ID No: 700454302H1
  unsure 182, 199: a, t, c, g, or other
cagagacctttgactcaattgtccttgatgaaaccaaagatgtccttgttgagttctatgccccatggtgtggtcactgcaagagtcttgcaccgacgtatgagaaggtggcttctgttttcaagttggatgaaggagttgttattgctaaccttgacgctgacaaacacagggatttggcngagaagtatggagttantggatttcctaccttgaagtttttcccaaagggaaacaaagctggtgaagattatgatggcgatagggacttggtt

SEQ ID NO: 4032 - DNA, 276 bp, Zea mays
  misc_feature: Incyte ID No: 700454303H1
  unsure 149, 161, 173, 190: a, t, c, g, or other
ggaaccccagggttcagaagaagctgcaagaggagctcgaccgtgtggttggccgtgaccgcgtcatgctggagaccgacttccagaacctcccctacctacaggccgttgtcaaggaatcactccggctgcacccgccgacgccgctnatgctcccgcancaaggccagctncgaacgtcaagataggnggttacaacatccccaagggcgccaacgtgatggtgaacgtgtgggcgtggcgcgtgatcccaaggtctggagcaacccgctggag

SEQ ID NO: 4033 - DNA, 280 bp, Zea mays
  misc_feature: Incyte ID No: 700454306H1
  unsure 137, 187, 199, 246, 253: a, t, c, g, or other
gccgtctacgcctccaatttggcctctctcccttgcaagtttaagcttcaccttcaaccatgggtaaggagaagtcccacattcaacattgtggtcattggccacgtccgactctggcaagtcgaccaccaccggcnacctgatctacaagcttggaggcattgacaagcgtgtaatagagaggttngagaagggaggntgctgagatgaacaagcggtccttcaagtatgcttggggtgctcganaagctcnagggctgagcgtgagagggggtatcac

SEQ ID NO: 4034 - DNA, 270 bp, Zea mays
  misc_feature: Incyte ID No: 700454307H1
  unsure 10, 20, 148, 167, 178, 185, 188, 190, 201, 210, 215, 217, 220, 233, 236,242: a, t, c, g, or other
gctgtatgtnactgttagtnggcccagggccacgtgaaagtcaggcattgttggcgcccaattgaccgccggacttgtcagtgatgcggatcggcgacgtgaacgtgtctggccgtgcgctcccccaatggcctcttccgcggaagcntggctctggctccttcgtngactgtcgtgngtctctntancnaattgtggatnctcacagangccgntncanaagctgttgggangcngtgccnttgagaaatggcgatcttttgggcaccc

SEQ ID NO: 4035 - DNA, 277 bp, Zea mays
  misc_feature: Incyte ID No: 700454308H1
  unsure 75: a, t, c, g, or other
cactcccagggtatactccatagagacctgaaatcagagaacatacttctgggagaagatatgtcagtcaaagtncgcagatttcgggatttcatgcttggaatcacagtgtggaagtggcaaggggtttacaggaacctacaggtggatggctccggagatgatcaaagaggaacatccatactaggaaagtggacgtgtaacagctttggaatcgtcatgtgggagatcttgactgctttggtcccgttcagcgacatgactccagagcaggctg

SEQ ID NO: 4036 - DNA, 271 bp, Zea mays
  misc_feature: Incyte ID No: 700454310H1
gctccatcagattcaattctctgcaggtgcaggaccgcgaacacgaggaggcaggggagcagcatccacaaccacaagccatggcggggaggaccaacatccccactaacaactccgccctcatcgcaatcatcgccgacgaggacaccgtcactggcttcttgatggccggcgttggcaatgttgatctgcgcaagaaaaccaattacctcctcgtcgacaacaagacgacagttaaacaaatcgaggacgcgttcaaagatttactaca

SEQ ID NO: 4037 - DNA, 270 bp, Zea mays
  misc_feature: Incyte ID No: 700454312H1
  unsure 140, 230: a, t, c, g, or other
gaggacaatagggcaggtgaagccacccaaaaaggattttacaagtatgagggcaagaggaaagcgactcctgatcctgaaattatgaaatatattgaaaaatctaggagcatggcaggagttacaccagatcctgagcngatgaagtaagtgagaaagacatagtcgagatggtgtttttcccggtgataaatgaagctgccgagtccttgatgagggtatcgccgtcnaaggcttctgacctagacatcgttcgatcttcggcatggg

SEQ ID NO: 4038 - DNA, 271 bp, Zea mays
  misc_feature: Incyte ID No: 700454313H1
catcgacgcgctccgcatgaagatcattcgcccagctcaaggccaacgaagatatgaagaaaaacactatgatgatggtggagcaaagcaaggtactgaatactcctggagctgagaaaaagacaaagagggagttgtttgatgcacttcgacaggaactggagaccccagtccttgaaaaagcctccaaggcagtttgggagctgattctagacaatggtgggttagggaaagagataactgaaacggttgagaaagtcttctgccggct

SEQ ID NO: 4039 - DNA, 270 bp, Zea mays
  misc_feature: Incyte ID No: 700454314H1
  unsure 34, 110, 117, 122, 125, 135, 141, 189, 213, 239, 244: a, t, c, g, or other
catcgacgcgctccgcatgaagatcatcgcccanctcaaggccaacgaagatatgaagaaaaacactatgatgatggtggagcaaagcaaggtactgaatactcctgganctgaganaaagncanagagggagtngtttgntgcacttcgacaggaactggagaccccagtccttgaaaaagccttcanggcagtttgggagctgattctagncaatggtgggttagggaaagagatanctganacggttgagcaagtcttctgccggtc

SEQ ID NO: 4040 - DNA, 59 bp, Zea mays
  misc_feature: Incyte ID No: 700454316H1
  unsure 4, 8, 11, 28, 34, 46, 48: a, t, c, g, or other
gacnccgnaangataacggacaagagangcggangctgataggtanangagacggagga

SEQ ID NO: 4041 - DNA, 271 bp, Zea mays
  misc_feature: Incyte ID No: 700454317H1
  unsure 100, 191, 224: a, t, c, g, or other
gctcggtctgacaaagacataggactgatgaccgcatgaccatgctggtcatgcgcataccattcatattgtagcatccatcggtcgatcagtcactggnaacaggagaatcgtcggcggacctggagcgggatccaggaggtgagcccgagtactccttgggggacctggcggtgcagaggagatccatnactgtctgctgggggcgactcttctcataaacntgtcagcatcatctctactgggcaggagagtaggacctccgcttctc

SEQ ID NO: 4042 - DNA, 276 bp, Zea mays
  misc_feature: Incyte ID No: 700454318H1
  unsure 7, 43-44, 73, 77, 81, 84, 93, 108, 153, 172, 178, 208, 229, 233-236,239, 242, 258, 265: a, t, c, g, or other
gccactncaaacacttgcgccgccactgcctcacaggtaaggnngccatggtctccggttcgggcgtgtgcgngaanatcnggnggtggacgngcgccaccacatggntgggccgtctctcctcgatcatagccaaggagctgctcaatgggnagaaggtggtcgtcgttcnactgcngaggagatctgcatgtcgggcggcctcgtngtcagaagatgaagtacctcngctnnnnccncanagcggatgaacaccangccgtcncacgggcccat

SEQ ID NO: 4043 - DNA, 273 bp, Zea mays
  misc_feature: Incyte ID No: 700454320H1
  unsure 20, 22, 129, 134, 152, 163, 168, 178, 185, 188, 195, 217, 232, 240, 248: a, t, c, g, or other
cagaaccctaaacccgcatncngaacatagacgccggcgatctccgccgccaccgccatgttcgggaccccatccatcactcccgctttcgggaacccctccagcaccccggtttttggcacgccatcngctanacccgcatttggcgcgangtcgtccaccncggcnttcggcaccntctcgtngangcctgcnttcggcaccccttcgtcgactncccgctttcggtacnccgtcgtntacgccancgttcgggaccgttccacgaccctg

SEQ ID NO: 4044 - DNA, 278 bp, Zea mays
  misc_feature: Incyte ID No: 700454322H1
  unsure 43, 47, 55, 72, 89, 94, 101, 170, 228, 247: a, t, c, g, or other
cacggttccactccaacttctccgatctccaggaatccgcggntgangcgccggngatgcgcggctcccatngtccgacgccgaatacntgcgncaggtcnacagggcgagccgccacctccgcgccctcatctccaacaagggatgcgccccgatcatgctcccgcctngcatggcatgatgctggaacttatgacctgaagacacaaactggtggtgcaaatggtncgcttagatatgaaggacnagtacacccatggttcaaatgctggtttaaa

SEQ ID NO: 4045 - DNA, 276 bp, Zea mays
  misc_feature: Incyte ID No: 700454324H1
  unsure 45, 88, 91, 103, 112, 121, 123, 159, 161, 176, 178, 193, 221, 233, 258,262: a, t, c, g, or other
gccccagcaaatctcacgcacagaaacaccaaagccccaaaggcncaaactcaccaccttcccaatggagaacggcgacgaaaccctngcntcccccacggcngccgcgagncggacgcgntnaacggcggctcacggaggaggagcaggtcccccatnanccaccccgcaaagtncntacgtcacgctggcngacgacaaccccggtgcctaacggcggngtcgtgaaagangaggaaggcggtgccacaccaccgngaantccttacgcagctg

SEQ ID NO: 4046 - DNA, 271 bp, Zea mays
  misc_feature: Incyte ID No: 700454325H1
  unsure 45, 79, 92-93, 112, 124, 181, 216, 222: a, t, c, g, or other
ttgaattggagcctgccaaaggagaagatgcattgaactcatgcnatacattttctggacctttctacacgaagcaagnaccctttctacgnnagcaaagaaactctttttngaaacaaggttntcagtcattgaaaaactactgtgctcctaggaatggtatccccaaggtggcaaaggnttacttgcagcaagaagaattacctatgttggtgntagttnatgccaagaacaccagtgataaatcaggctcatattcaagttcagctga

SEQ ID NO: 4047 - DNA, 256 bp, Zea mays
  misc_feature: Incyte ID No: 700454328H1
  unsure 13, 153: a, t, c, g, or other
gcctgggggaggnttcctaccttaagcaccttttatcagcaggcatcagatgaattgagggtttacactgacccaagtgttgagatgtcaacttcatttgacagggttagggaatagtcactcggggagtgttgctaaaacttaatctgaaancttaagcatccctgtcaccgatagtaaatgccagatgtccatgcataggtgcatactttatgatatggtggtgtactcgtaatcttgagtgactttatggcat

SEQ ID NO: 4048 - DNA, 269 bp, Zea mays
  misc_feature: Incyte ID No: 700454329H1
  unsure 251: a, t, c, g, or other
agcgagagagaacccaaacggagagagacaatcgagagagatggcaaactgttttggtgacgtcgtggacaattacaagctagacacaatgccaagatatatcggcaaaaagaagactcgagaagaccgggcacgagaggcctcctatctcagtaatgagaatgagaagtacaagaaagctaaagactatgtgaacatgctgaaggactggtacggcaatggagcgtcgaagctgtgcgtgatctacaacnagacgggcggaaccctgc

SEQ ID NO: 4049 - DNA, 269 bp, Zea mays
  misc_feature: Incyte ID No: 700454330H1
  unsure 14, 231: a, t, c, g, or other
gcccgttgcccgtngcccgtcggtctctcttgcagtctcgccgctccccttcctcccccgcaggaatccgaatcagtaagtccggcgacctaggtctctcggcttgtccgcagcccgccggtcagtaatggcgcaggatgatccggttgtttctgctcagtggctgcacgagcacctagggatgcctgatgttaaggttttggatgcttcctggtacatgccggtagagancagggatccatggaaagaatatcaggtggcacacatcc

SEQ ID NO: 4050 - DNA, 268 bp, Zea mays
  misc_feature: Incyte ID No: 700454331H1
gtcctcctcgtcctcgcttctgcactcacctcctgagagtgatgagacaagcggcggcagcgagcagcaagccccgccggaagacgagaacaaggagaaagagcggcagtggccaaggagaaggcgtacgcggcggagaaggtcgtccagcaggagatgctcaagtacgccaaggagaagggtctggtgtccccgaccaacggcacggggtggtacaggggcatcgccgggagttcgtggacgcccacaacgagctccgcgcgcgcta

SEQ ID NO: 4051 - DNA, 267 bp, Zea mays
  misc_feature: Incyte ID No: 700454332H1
  unsure 126, 129-130, 149, 165, 205, 232-233, 235-236, 242, 253, 256, 258-259,262: a, t, c, g, or other
gccgctatgatattagcgggaggcttctgaatgtaaacagggcatcttctaggggcactcgcatggaaagacctcagagacaatttgcaccagctttcagagcttatgttggcaacttgccatggnaanntgatgactctagggctggngcagttgttcagcgancatggagaagttgttgatgctaaggttgtctacgacaganaaactgggcgctcacgaggattcggtnntnnatcaanggtgtcaaagnagnanncangctgg

SEQ ID NO: 4052 - DNA, 271 bp, Zea mays
  misc_feature: Incyte ID No: 700454333H1
  unsure 120, 158, 189: a, t, c, g, or other
ggccagcaagggcatcaccaagctgttccctatccagagggctgtccttgagccagtaatgcaaggaagggacatggttggtcgtgccaaaacggggactggtaaaactttggcatttgnaatccccataatggatgcaattattcgtcacaacgagnagtacaagcctggtaagtttccattggctancgtcttggcgccaacaagagaacttgcaaaacaggttgagagggagttccttgattcctcccctttggaaacgctgtgtgta

SEQ ID NO: 4053 - DNA, 271 bp, Zea mays
  misc_feature: Incyte ID No: 700454335H1
  unsure 56, 83, 164, 235: a, t, c, g, or other
cacacaccccacctaccccgggccggaccggcaggcagcacagcatggacctgcgnccctcctagagaaggccctgctgggcntgtttcgccgcggctgtggtggccatcgccgtggccaagctgaccggcaagcggtaccgcctcccaccggggcccccgggngcccccgtggtgggaaactggctgcaggtgggcgacgacctgaaccaccgcaacctgatggcctggcgaanggttcggcgacatcttcctgctgcgcatgggctgcg

SEQ ID NO: 4054 - DNA, 271 bp, Zea mays
  misc_feature: Incyte ID No: 700454337H1
  unsure 124, 222: a, t, c, g, or other
gccatcctaagatggactcatggctaggcaaccggaaaaggatcatagtcttgaatcgcaaggacatgatctcaactgaggatatgaatgcatgggctacttactttggtaatcagggcatcanagttgttttctccaatggccagctgggtatgggtacaatgaaattaggtaggatggcgaaatcagtagcatctgttggcgaacacaaagaggaagganaagggattgcttcctcgtccggttcgagctggaatagttggatatccaa

SEQ ID NO: 4055 - DNA, 230 bp, Zea mays
  misc_feature: Incyte ID No: 700454339H1
  unsure 19-20, 30, 41, 56, 67, 74, 78, 84, 87, 95, 109, 131, 143, 152, 161, 171,186, 190, 218-219, 228: a, t, c, g, or other
gcgccgacttcctgcgcgnncccggggtgnagacgcccgtnatcgtccgcttctcnacggtgattcnacgagcncggnataccnganacgtctgncgcgacccgcgggnttagccgttcaagttctacacncgggagggcaantgggacctngtgagcacnaagcttccangtcttcttcatccgngacngcatcaagttcccggacatggtgcacgnnctcaagccnaa

SEQ ID NO: 4056 - DNA, 268 bp, Zea mays
  misc_feature: Incyte ID No: 700454340H1
cgaactcggtgaactctttctcctcgcgcagaccggagcacaatcaaggattccagtccagtcctgccaatggagtgcgttttgggcttggttggccgcgacttcgcggtggtggcggccgacactccgccgtgcagagtatcctcgtccacaagactgacgaggacaaagtaatggtcctcgactcgcacaagctgttgggcgcttcaggggagcctggtgaccgggtgcagtttacggagttcatacagaagaacctccacctgtc

SEQ ID NO: 4057 - DNA, 267 bp, Zea mays
  misc_feature: Incyte ID No: 700454344H1
tggtgatcctagatacaatgctccccctccgaaccagcagtactatggtcagccgccaatgggcccgcagcaaggctatcctcaacagccagatccctatgctaggcctccatacagtggacctggtcaatggcctcccaggggtgctccggctgcagatggctcttaccaggcgccagtggcatcttatgggccgccttctcagcacccttctgcttatgggcaaacgtacatgcagcaactggatctgatggatatgctcaacag

SEQ ID NO: 4058 - DNA, 272 bp, Zea mays
  misc_feature: Incyte ID No: 700454346H1
  unsure 3, 54, 75, 83, 85, 89, 96, 98-99, 126, 134, 140, 144, 147, 157, 164,195, 210, 215, 218-219, 254, 258, 260: a, t, c, g, or other
ggngtacgacggggacaacaagcccgagtacgaccaggacccgcaccggcaggngctggtggactgggtggacanggtgggcngngcgncttcgcngnnaccgtcttacgacttcaaccaccaagngcatcccnaaacgncgcngtngaaggcaagnatgtggnggctcatcgacccgcagggaaaatgcgccgnggagtcatcggctgntggcntgnncaaggcgttcactttgtcgacaaccacgacaccgnttcnangcaggccatgtg

SEQ ID NO: 4059 - DNA, 268 bp, Zea mays
  misc_feature: Incyte ID No: 700454350H1
  unsure 2, 8, 11: a, t, c, g, or other
gngcgcanagnaatctggtgtctcttgctccgaccccgttggcgactgagacgcgatccccttctcctgcactgccgtcctccgtcgctgcgatgcctcggtattactgtgactactgcgacacctacctgacccatgactcgccatctgtccggaaacaacataatgctggatacaaacacaaggcgaatgttcgaacctactatcagcaatttgaggagcagcaaactcaaagtttaattgatcaaagaatcaaggagcatcttgg

SEQ ID NO: 4060 - DNA, 269 bp, Zea mays
  misc_feature: Incyte ID No: 700454351H1
  unsure 248: a, t, c, g, or other
gtccccgatctcctcccacccgcatccaagggtttccttctcgaccgtgcggaacgagccagagaacaggtatggcggcggcgcggcacctcagatccggcctccccctcctccgcgcccacctcgcatcctccgaatccgcggccgtcgctcaggtttcgaggggcttcgcgtcgcaggccgccaagcccaccgggaaggagatcaaggttccaaaggctctgtttggcggcacaggcaactatgcnagtgcactgttcctcacagca

SEQ ID NO: 4061 - DNA, 267 bp, Zea mays
  misc_feature: Incyte ID No: 700454352H1
  unsure 17, 41, 89-91, 125, 137, 146-147, 150, 155, 162, 192, 195, 204, 237: a, t, c, g, or other
cttctttcccgttcggntcacagcgaagaaggaagccggtnagggtttccacctcctttcccctcctctccttcagcgacgaccgcggnnnacaccctcgatatccttcccctcggacccggagnagagcagcagcntccagcgcnngcnacgcntgccctntcgttattgggaggattcgccatgtctganatngagtcgtcncagctcttatgaactcgacaagctccaggatanagcagcttcaggaggcatttgctgagcttg

SEQ ID NO: 4062 - DNA, 266 bp, Zea mays
  misc_feature: Incyte ID No: 700454354H1
  unsure 34, 61, 83, 85, 169, 178, 191, 224, 255, 260: a, t, c, g, or other
gcagcagcagcacgaaaccctgtagtagcctgcnatgactacgcgctgctgcctggtcgtngccactctcctcgcggcgctgntntcggtcagtgccagcctcgagttcggtttctacaacaagacgtgccccagcgccgagaccatcgtgcagcagaccgtggccgcngcgttcacnaacaactccggcntcgtccggagctcctccgcatgacttccatgantgttcgtcagaggcttgagacggctcggtgntgatngactcc

SEQ ID NO: 4063 - DNA, 269 bp, Zea mays
  misc_feature: Incyte ID No: 700454356H1
  unsure 7, 11, 29, 40, 54, 71, 90, 102, 114, 119, 148, 163, 172, 175, 184, 187,190, 201, 208, 219, 224, 235, 247, 255, 260, 262: a, t, c, g, or other
caccgcncggngcccgccatgtattcggncaaccactggngcggctcgttcganatcgccgatggggcggnggaggatgaccacagccgnaacatggacctngaccgcggcgcnctgtncggcgcggcagcaccacgagctggacganacgcagcagagctgnctgctaggnccnccggatgcnaanaanaaggacaagtncgtgganctcgcgtgtgncgtcntcaagggcaanctcctctggtgnaccttatngcggncntcgcgct

SEQ ID NO: 4064 - DNA, 268 bp, Zea mays
  misc_feature: Incyte ID No: 700454360H1
  unsure 30, 63, 90, 194, 222, 241: a, t, c, g, or other
gcctgctgggaaggctgcccagcctgcggngaccaccaagttcccgaccaagcccgctcctcnctcgcagaccggttcgggatgcacgcngtcggtggctcatcagctcgtggaggctttggccgtggtgaacgtggccgtggcagaggtggacggggatatggccagaaccgtggcttcagtggtgacaatgncagtgacttccagggaggttatagtggncggaagctatggggatggngctgtaactggtggatctgaaggagaa

SEQ ID NO: 4065 - DNA, 265 bp, Zea mays
  misc_feature: Incyte ID No: 700454362H1
  unsure 182, 218, 223, 241: a, t, c, g, or other
gcaatggaggttctagtagtatagttaatggtgctccatccgatgaccaatttatgtatactggtaaagttgttcatggccttcctggtggcatggatgcttcatcaagcctgctaacagcacacaatcctgctgttgggcagtttaatggacacaatggagcaacaataaagacagaattnggctactcaagcaactcagattttggattcagcaangaggncgtgttcctagagcagtnagttggagatgtatcaggtgcatc

SEQ ID NO: 4066 - DNA, 264 bp, Zea mays
  misc_feature: Incyte ID No: 700454363H1
gcggatgggcggcgtggcgtcggcgtcgccgccggatcaggcggggaggagcaaggggcgggagtggccaaggtcagagacgccgtgctccgccttctctgagcgcgcggtagcttattactagtattaactattaagcttaagctaggtggtggtcaaggtcaagcatgcatcgatctacgtactacacagctcactaaagcaaggaattagtgcatgttcgttgctcgatcgatcaaggtagctagctatctactgccaata

SEQ ID NO: 4067 - DNA, 267 bp, Zea mays
  misc_feature: Incyte ID No: 700454365H1
  unsure 159, 224, 229: a, t, c, g, or other
gttggatctgaacccaagctccgagtcgctttcggggtgggcattctcctcttcgtcttcggttgcaagaaagaaaaagcatcatggacggcttccccaagagcgtcggcggtggcggccctaacattccggcgggatcccaccccgcaggcgggagcnaggcggcggcaggaggaggcgcgacgcagcggacgcagtatccgtatgtgactggtaattcagtnattgncttgaaatacaaggatggtgtgatcatggcatgtgaca

SEQ ID NO: 4068 - DNA, 267 bp, Zea mays
  misc_feature: Incyte ID No: 700454366H1
  unsure 75, 88, 93, 97, 99, 123, 127, 193: a, t, c, g, or other
cccggttctccctcgctccagatctcccttcgcagccggccagggaccccttcacagcgcgggagatggctgatncaggaggtcccanttgcngttnangcaccaaccccagttcttggaganccantgagacttgatgactgcgctgcagctggtgatgaagaagtcaagtgctcatgatggacttgtgaanggtcttcgcgaggctgccaaggccattgagaagcatgctgctcagctttgcgttcttgctgaggatgtgaccag

SEQ ID NO: 4069 - DNA, 266 bp, Zea mays
  misc_feature: Incyte ID No: 700454367H1
  unsure 32-33, 72, 83, 86, 229: a, t, c, g, or other
agaaccacacggataaaccctagctgcgcganncccccggcgatgtcggtggccatccgctccggcgagctnccttgcgtgcnccntcgcactccggcgggcgcccttggctgtgtctgtggtgtcggtgcggatgagggctaggggcgccgtggctgtgcgggcggaggcaacggccgagggggtagggaaagaggggaagaaggcggcggggaagaagaagccggcnagcgggatcaccaagccgaagcccatctctacagagt

SEQ ID NO: 4070 - DNA, 267 bp, Zea mays
  misc_feature: Incyte ID No: 700454368H1
  unsure 52: a, t, c, g, or other
ctcgagagcaagggagcgcggtgacgtcagcgttttccagggtttctcgatncggctgctatggcgaccagggtagcgtcgagattcctgcagcgcagctcctgtcttccggcggcaaggtcctcagcgaggaggagaaggccgcggagaaagtgtacatcaagaaaatggaacaagagaagctggagaagctcgcacgcaaagggccccagctcaggagagcaaccttcgtcgactacagtctctgcaagcaagtgatgtgaagac

SEQ ID NO: 4071 - DNA, 266 bp, Zea mays
  misc_feature: Incyte ID No: 700454370H1
  unsure 168, 243: a, t, c, g, or other
gatcaatgcaggagctcaagcctttgtaaattgttggagtgtgaccttggggagagcaagtgccactccccgagcacaatcatgaagatgttccagagttctatgttctgtttgcagccccagggtgactcctacacaagaagatctgcctttgactcgatgttggcnggctgcgtgcctgttttcttccatcccggttcagcgtacgttccagtatacatggcatctcccaaagaactatanaacgtactctgtattcatccctg

SEQ ID NO: 4072 - DNA, 265 bp, Zea mays
  misc_feature: Incyte ID No: 700454372H1
  unsure 116, 130, 147, 251: a, t, c, g, or other
cgatttttctcactagtcgcaactcgcaatcaaatcgaacgaacccagccgaagcgcgagtgagcaaggcggaagcggcgatggagcggctgcagcggatctttggcgcctccggnatggggcagccgcngacggactcgccgctgntcgactcttccgagcaggtctacatctcctccctcgcgcttctcaagatgctcaagcacgggagggccggcgtgcccatggaggtcatgggtctcatgctcggngagttcgtcgatga

SEQ ID NO: 4073 - DNA, 263 bp, Zea mays
  misc_feature: Incyte ID No: 700454373H1
  unsure 71, 101, 261: a, t, c, g, or other
atttttagttctgggaaatgaggatggacaaagggctctacagaagaggactctgatatttttactttggnacgatggaccaaatcctacttgaaaggttnaacaaacctgcatacatggatgagtttttttggcggtgtttttttgtaaggattcatggacgatttggcgtttgtttagcctcaacagatgtcttgttctgatgatggaaaagggatcccgtgatagcaacattctgagaaatatttgctgttgaggggntc

SEQ ID NO: 4074 - DNA, 266 bp, Zea mays
  misc_feature: Incyte ID No: 700454374H1
  unsure 6, 27, 36, 40, 53, 59, 63, 116, 163, 171, 189, 221, 237, 249: a, t, c, g, or other
cccgtngcatcccatcccactaccacncatctcgtngtcngccgattcgatcnggtttnttcnaacccaggggcagtgatggcgacgaagaggagcgtgggcaccctcggcgaggnggatctgaaggggaagaaggtgttcgtgcgcgccgacctcaacgtcncgctcgangatgcccagaagatcacngacgacacccgcatccgcgcctccgtccccancatcaagttcctcctngagaagggcgcnaaggtcatcctcgccag

SEQ ID NO: 4075 - DNA, 261 bp, Zea mays
  misc_feature: Incyte ID No: 700454377H1
  unsure 67-69, 123, 161, 190, 197, 199, 203, 205-206, 244, 255: a, t, c, g, or other
gggggccgtggtgtcggactcggacggcgagatggtcgcgaacggcggcgagccaggaggtggcggnnncacgagcacacgggctcctctccccgatcccgatctgtgtgcctggctgcttgnaacctccgtgggatggaggcggcgcgcagcagcaaggnggagtgctccgtgcggcggggccgaggcngctgacnanttcnanngttacacgacgcggtgctgctcgacgtcctcaatcgcntcgacgacgtnaaggcg

SEQ ID NO: 4076 - DNA, 262 bp, Zea mays
  misc_feature: Incyte ID No: 700454378H1
atcaccttcagttcgccagaagagcaagaaacttatataaggaactggctgcaggaaagaataggctttgaagcaaactttaagatatccttttatcctggcaagttctcaaaagagcgccgcagcattattcctgctggggatacttcacagttcatctcctcaaaagaagctgatatagcgattttagaagaaccggagcatctcaactggtatcatcatgggaagcgttggactgataagttcatcatgtcatcggtgt

SEQ ID NO: 4077 - DNA, 264 bp, Zea mays
  misc_feature: Incyte ID No: 700454380H1
  unsure 156, 187, 190, 262: a, t, c, g, or other
atccctcgtctggtatcgtctcccacacccctctgccccaactcagaaaaaccctcgaaaagcggcggcggcgcgacatggcggaggtcgaggctccagctgctgcggttgcggcggcgacccctgaggtggcgacggtgaccgagggcggagcgnctacggaggccgaagggtccgcacaagcttnacngccagtggactttctggtacgacatccagtccaagcccaaaccgggcgctgcgtgggggcacctccctcaanaa

SEQ ID NO: 4078 - DNA, 266 bp, Zea mays
  misc_feature: Incyte ID No: 700454381H1
  unsure 109, 245: a, t, c, g, or other
gagagacgaaggaagagagcctaggactgactcactgacccgaacccgttcccggcgggacttcctctcgaatcgtcccagtcgagaccctagttgccccacgaaccgnggatccaagatgagtttcctgttcgggaagaggaagacgcccgccgagctgttaagagaaaacaagagaatgctagatcgatccatcagggaaattgagcgagagagacaaggattgcaggcccaggagaaaaagntcatcactgagatcaagaaaa

SEQ ID NO: 4079 - DNA, 263 bp, Zea mays
  misc_feature: Incyte ID No: 700454383H1
ggaaagcccacagaggacgacgtagaagctaaaatggcacaaatggtctgttcttttaacaaccgggaagagtgtctggcgtgtggaagctagattggagctccatctggacactgcacttatttgtgaccacaggccacagcattatatgccgccggctgatgactggagtccaataaccagaacgaaatctgatgtaggatgaggtagaaactccattcccttcccataatgggaacaataccttgtctctcaaatactgt

SEQ ID NO: 4080 - DNA, 96 bp, Zea mays
  misc_feature: Incyte ID No: 700454385H1
  unsure 8, 24-25, 39, 49, 64, 86, 91: a, t, c, g, or other
cgagccancagatgcagctatcgnntatggtcttgcacnagaaggcttnccagtgtacggtganaagagatgtgcctgcatccttngatgnttgaa

SEQ ID NO: 4081 - DNA, 263 bp, Zea mays
  misc_feature: Incyte ID No: 700454391H1
  unsure 110, 151, 166: a, t, c, g, or other
attcaagccattggattattggatgatcttgacaaggagcttaacacttatgccatgagagttcgtgaatggtatggctggcactttccagagctcaccaaaatagttancagataatatacagtatgccaaagttgtgaagatgatgggnaacagagttaatgcngtcaaccttgacttctctgagatattgtcagatgaagagctagaaacacagctaaaggaggcagcagtaatatccatgggaacagaagttagtgacc

SEQ ID NO: 4082 - DNA, 85 bp, Zea mays
  misc_feature: Incyte ID No: 700454392H1
  unsure 9, 12, 24, 40, 49, 51, 54, 58, 66, 78: a, t, c, g, or other
ataacgctncangctgcaggagtnactgctcattactacnaggatgagncngcncctnactggcanatgtgctgtatntgtagtt

SEQ ID NO: 4083 - DNA, 261 bp, Zea mays
  misc_feature: Incyte ID No: 700454394H1
tcttcctcggacattcgaaggtcttgaacaaagtttccatgaagacattattttgctatccaaggaactacaggaggcagaggatgctgaaaattctagacacatggagagattgaaggatataaatacacagtaccaggagaaactattaacacttagagctcggcaagcgaactatagagatgagttcctgcgcaaggaatctctagcacgccagcagcaataccagcacgccagcatgagccattatgccagcattcc

SEQ ID NO: 4084 - DNA, 261 bp, Zea mays
  misc_feature: Incyte ID No: 700454395H1
  unsure 5, 73, 114, 121, 209, 244: a, t, c, g, or other
cttcntcggacattcgaaggtcttgaacaaagtttccatgaagacattattttgctatccaaggaactacagnaggcagaggatgctgaaaattctagacacatggagagattnaaggatntaaatacacagtaccaggagaaactattaacacttagagctcggcaagcgaactatagagatgagttcctgcgcaaggaatctctagnacgccagcagcaataccagcacgccagcatgagcnattatgccagcaattcc

SEQ ID NO: 4085 - DNA, 88 bp, Zea mays
  misc_feature: Incyte ID No: 700454396H1
gctaatcggggcgccccaaccatctctcgccaagatctcgacaaggactagcccatgcgcgtgtcaactggagtagttaagcggcgcc

SEQ ID NO: 4086 - DNA, 292 bp, Zea mays
  misc_feature: Incyte ID No: 700454401H1
cgcccccgtacgtgtccatctctccactcctttcctttccttgttggtaagagcaaggcgagacgtaacgtaatccgggccatggcgttcttccggggcctcaccgcggtctcgagactgcgatcccgcatggcgcaggaggccaccacgctgggtggtgtgagatggctgcagatgcacagcgcgtccgatctcgatcttaagtcccagctgcgggaatgattccggaacagcaggaccgcttaaagaagcttaaatcagagcatgggaaggttcagcttggaaacataac

SEQ ID NO: 4087 - DNA, 286 bp, Zea mays
  misc_feature: Incyte ID No: 700454403H1
gacaacttcaatttacaatctcatattgggcaagctatattgcgatcactatggtactatgcacatacaaggtaatcgtgagtattcatgtaagcttaagttcaaggagcagtcaattatcgatcgcaaccctcaccaggtgcaaggtgttgttcaagatagaaatggtcgaactgttgctacactatttggaaaatgggatgaaagcatgcactatgtaatgggtgattgcttgggaaaggcaagggaactgaacagttatcagaggcccattgttgtggaaaag

SEQ ID NO: 4088 - DNA, 240 bp, Zea mays
  misc_feature: Incyte ID No: 700454405H1
  unsure 150-170, 195: a, t, c, g, or other
gttccaggcattagatgagaattttatgttacattaccgtacaaaagaatatgttcgtttatcttctggatgacttgcaattttggactggattgcattcaattgcagatttgctttgcttttacactaacgtttgaagcgactgagacnnnnnnnnnnnnnnnnnnnnngccaagatgtgattgatgggttgcnccagtaacattctattttttatgagttaagagttcttttgattcc

SEQ ID NO: 4089 - DNA, 281 bp, Zea mays
  misc_feature: Incyte ID No: 700454406H1
ggcaggtcaatacttcgtcattaatttgtacccgatttcttgtcattcatttcataaaaacatgtagttttgatgtatttggtcataactaacaattatctatccttctgaactaaactagtatcacagggtcaaatgtacagaattgttaatataatagtattatcttatttagtgtatgtgaaagggaaatgtgcccttgggccatttttaagtattttggtgattaagtgtccaacacaaatggttgtgtgttaaactatgacaaatggtggacaaag

SEQ ID NO: 4090 - DNA, 284 bp, Zea mays
  misc_feature: Incyte ID No: 700454407H1
aaggatccagtaacaaatgagtttgtcctcgagggtggagcactggtactggcagatatggggatttgtgctatagatgagtttgacaagatggaagagtcagaccggacagcaatccatgaggtaatggagcagcaaacagttagcattgccaaggctggcatcaccacctctctcaatgcgagaaccgcaattctggctgctgcaaatccagcatggggaaggtacgacatgaggaggactccagcagaaaatataaatctacctccggcgctcctgtcccg

SEQ ID NO: 4091 - DNA, 287 bp, Zea mays
  misc_feature: Incyte ID No: 700454409H1
  unsure 11, 44: a, t, c, g, or other
ggctaatcggngcgccccaaccatctctcgccaagatctgcganaaggactagcccatgcgcgtgtcaactggagtagttaagcggcgccatgggtatgcggagaggcacccaaaggcgttgggtttccgctggtacccggcggcaacccaccggtccctaactctggtactgtggagcctagcggcattggtcgtcgttgtgaatttccatcttctcatcattcataaggaggagggtgagaatatgagtacacacgagatccgccgatcgattatgagggaatgg

SEQ ID NO: 4092 - DNA, 283 bp, Zea mays
  misc_feature: Incyte ID No: 700454410H1
  unsure 110, 117, 158, 176, 276: a, t, c, g, or other
ccaccaccgccggccgggaagcaagctcaaaccctaatcgccgtccgccggcgacgccagcacgatggcccgctacgaccgcgccatcaccgttttctcccccgacggcnacctctnccaagtggagtacgctctcgaggccgtccgcaagggcaacnccgccgtgggcgtccgcngcacgacaccgtcgtcctcggcgtcgagaagaagtccacacccaagctccaggactccaggtccgtgcgcaagatcgcgtgcctagacattcacatagcntggcgtg

SEQ ID NO: 4093 - DNA, 286 bp, Zea mays
  misc_feature: Incyte ID No: 700454411H1
ggcaaatgatcatgctttgagtgatgatgaacatgatgagcctgctgcaaagaaaaagtcttcagatgttaaacaaaagaaagaaacaggttctgatgcaaaggaaaaggatgcaccaggaaaaaaaggttctacgaaacgtgcatcaaagccttctcaaaacagtaaaaatgagcctgaggtagagataaaaaaggttggcaagagagaaaagagttcaaaagaaactgacgtgtcaccagattcaaataagtcaaacaagaagatttctaaatccaaaaagggt

SEQ ID NO: 4094 - DNA, 284 bp, Zea mays
  misc_feature: Incyte ID No: 700454413H1
ctcaagaacagcatcctcccatactacccggacaccatgatcacctacatcaccgtcggcgccgaggtcaccgagagccccgccaacgtctccgccctcgtcgtgccagccatgcgcaatgtgcacaccgcgctcaagaaggccggcctgcacaagaagatcaccatctccagcacccacttcgctcgggatactgtcccggtcgttcccgccgtctgctggggcgttcaacagcagctacgcctacttcttgaagcctatgctccagttccttgtggagaatc

SEQ ID NO: 4095 - DNA, 280 bp, Zea mays
  misc_feature: Incyte ID No: 700454414H1
  unsure 275: a, t, c, g, or other
gcggcggcgaggaggctctaggggcgccagccgagggtggtggtccgtggggactgggaggggagggcggcgatggaggagaaggcgtcgtcgccgctggttccgccgccgtcggagatcgacctcgaggcgggcggcggcggggagcagtccagtgccggatctgcctcgagaccgacgggagggacttcatcgcgccctgcaagtgcaaggggacgtccaagtacgtgcaccgcgactgcctcgaccatggagggcggtgaaggagggttttncattt

SEQ ID NO: 4096 - DNA, 282 bp, Zea mays
  misc_feature: Incyte ID No: 700454416H1
gtagacttgtaaaaggcagcgagtcatttgctattgttgcttttggaattcagatactgcagcatcctcagttctcaaaactttgttgggctacgtcaaagctacgggaaggcccctgcactgatataaatggaccatggaaaggctggccatttaattcctgtttgttgcagagcagcaccttacctggtaaatcactaaatggaggggacaatgttgtaaagggaaaggaaaagtctgtctgtgtgagagggctggttgctgttggcttattagcttata

SEQ ID NO: 4097 - DNA, 285 bp, Zea mays
  misc_feature: Incyte ID No: 700454418H1
ttgaataataaattgacgaaagagggccaagtatagcttagagagagaagctagctagctgaaatggaggctagcagccgccgccgcgtctctcttgtgccactgctggtggtgatcatcgggtgctgtgcctgccgcgcccagatcccgatcccggcgaggacggacgggttcgtgtacggcgggaagccgccggcgtggggcgagacggtggtggtagaggcgttcttggacccagtgtgccccgacagccgcgacgctggccggcgctcaagatggtcgtcg

SEQ ID NO: 4098 - DNA, 287 bp, Zea mays
  misc_feature: Incyte ID No: 700454419H1
  unsure 2: a, t, c, g, or other
cngcgagcgaccgcaccggcacggcgcccatccatccatcgccatcctctagcccagtccaaaggaaccctagccatgagcgccgcctccaagaagctcttccaggccgccaggtccctcgtcctctccgcttctaaccgctccgtcctcgccgccgagggccgcaccgccgcgctcgccacgctcaccaactttggcaggaagaccctccccaccgcctacttatcctaccacaagcagggatcccaccatgccgcgtcggggtggggagccatcgccgccgcagt

SEQ ID NO: 4099 - DNA, 283 bp, Zea mays
  misc_feature: Incyte ID No: 700454420H1
ctcccacaacgccagtaaccaaatgctacaaaaggcttttcaacacagtggagagactatccatcgaaaaatatctgaagtttttgagatagttcccatactaactcaacgatttgtgaagcttcctagctcagttcaaactcatgctaggattgcaacagattctaggttcatgcccttttttcagaattgccttggtgccattgacggcacacatgtatccatcactatcgcagaagatagggcccctccatatagaaatagaaaaggaatctttcacaca

SEQ ID NO: 4100 - DNA, 283 bp, Zea mays
  misc_feature: Incyte ID No: 700454421H1
gcgccggcgcctccacttcgttttcctcactctctcctccagctcagggtccggcggcgaagggaaggcaagatgtacaccgcgaggaagaagatccagaaggagaagggtcttgagccctccgagttcgaggactccgttgcccaggctttctttgatctggagaacgggaaccaggagctcaagagcgacctcaaggacctgtacatcaacaatgctatccagatggatgttaccgggagtaggaaggctgttgtcattcacgtcccataccgcctgcgca

SEQ ID NO: 4101 - DNA, 279 bp, Zea mays
  misc_feature: Incyte ID No: 700454422H1
  unsure 53, 260, 272: a, t, c, g, or other
tgggtggcccgggacagagctagcaccgccacccttgagcagatctctgctgntggcaagggcttggtggtgccgtggtgtgaccaactgaaggtcctgtgccacccctccgtcggtggcttcctgagccattgtgggtggaactcgaccctggaggccgtgttcgctggagtgccgatgcttgcctttcccgttgcttgggatcagctggtgattggccatctcgtggctgatgagtggaagatcggcgtcgacttganggaacggagaanggaggat

SEQ ID NO: 4102 - DNA, 281 bp, Zea mays
  misc_feature: Incyte ID No: 700454423H1
gccggggtggcatcgaggacatcaagtacgtcggcagggccccgtcggctgctaccgcgacgggcttctactcggtgcacgtgcaggagcagacggagctggtgcagaaggcgctgcagcgcgaccccctcaactaccctttctgaaagaaacgaggcccctgtagattcttggaattggggaccttttgaatttgatataataccaatatagagagaacatgccttaaattttatctgtgcagccatttggtgaaataattgtttcgactctgcagtacc

SEQ ID NO: 4103 - DNA, 281 bp, Zea mays
  misc_feature: Incyte ID No: 700454425H1
catgaatgggtgaaggttgagggcgattcagcaaccgtggggattactgaccatgcccaggatcatttgggtgatgttgtctacgtggaactgccagaagttggcgtcagtgtatcccaggggaagaacttcggtgctgtcgagagcgtgaaggcgaccagcgatatcaattcgccagtgtccggagaggtggtggaggtgaaccggaagctaagcgaggagcctggattggtgaacgcaagcccgtacgagaaggggtggattatcaaggtcaagctcag

SEQ ID NO: 4104 - DNA, 281 bp, Zea mays
  misc_feature: Incyte ID No: 700454426H1
  unsure 14, 27, 29, 41, 96, 160-180, 185, 188, 191: a, t, c, g, or other
tcaggacgcgagcnacgacggcgccangntcgtggtgctantcgcgggttctcccgtcgattccgcctccgattccctccctcctcccgttgcggngactcctgctcctgcggcggaggccaagcaggagtcggtgtcggagacggaggaaactaagcannnnnnnnnnnnnnnnnnnnnaccancancancggcaggaggtgtgcaggccatggcggtcaccgtagtgcgggacgtcgagacgggcctggacgcgagcaccagcgactgggacggtgaca

SEQ ID NO: 4105 - DNA, 282 bp, Zea mays
  misc_feature: Incyte ID No: 700454428H1
  unsure 26, 43, 128, 235: a, t, c, g, or other
gggactggtctgaatttgatcaattncagaagcaacatgaagntaatccaaaagatgataatataagccaaaagctgttcaacacagcgatctgctatcgacaactttgttcgtgtatcagagtcacncaagactagttcatgtggtgagaggctaaaggatattattctggagaagggcatcacaaaagctgctgttgagcatgtaaaggaaagctttgcttctgctggacagnactggcttcagaacaagtgaagaatggacaacaggcttaaaactgcc

SEQ ID NO: 4106 - DNA, 277 bp, Zea mays
  misc_feature: Incyte ID No: 700454429H1
gcagaacgatcggatctagcagaattctctcaacctcatcggcggcggcgaagagcgtgcggatcggagatggagacaagcgggtggaggaggagagcggcggcgcgggcctcctggagccccgccacggtgtacctgtggctcgcgtcgccgcagcagcactgacgctcgcccaggctaagaaggactaacggaggttacccacaaggtctacttcgatgtcgagattgacggcaagcccgcagtcggattgtcatggggctttttgggaagactg

SEQ ID NO: 4107 - DNA, 78 bp, Zea mays
  misc_feature: Incyte ID No: 700454431H1
  unsure 55, 67-72, 74, 76: a, t, c, g, or other
attagctacaacaagcatgggtcaattatgattctggcagtaacttgtattcctntcaactagttgnnnnnngntngt

SEQ ID NO: 4108 - DNA, 283 bp, Zea mays
  misc_feature: Incyte ID No: 700454433H1
  unsure 21, 180: a, t, c, g, or other
catgaatgggtgaaggttganggcgattcagcaaccgtggggattactgaccatgcccaggatcatttgggtgatgttgtctacgtggaactgccagaagttggcgtcagtgtatcccaggggaagaacttcggtgctgtcgagagcgtgaaggcgaccagcgatatcaattcgccagtntccggagaggtggtggaggtgaaccggaagctaagcgaggagcctggattggtgaacgcaagcccgtacgagaaggggtggattatcaagtcaagctcagcga

SEQ ID NO: 4109 - DNA, 282 bp, Zea mays
  misc_feature: Incyte ID No: 700454434H1
  unsure 194: a, t, c, g, or other
cctcagaatgggcttattgtactgaggacacaaaggtccttgtggttggatgtttccatgagaactacagacatctggctgggaccaatctcttctgtgtcattggtgaccagtgtgttgatgcaaatattgttcaaactggcgtttaccgtttcattgctagaccacatgctcctggacgagtcaatctttanttgactttggatgggaaaacaccaatcagtgaggttttgagttttcactatcgtatggtgcctgacagtcaaaacttggctgaggatg

SEQ ID NO: 4110 - DNA, 284 bp, Zea mays
  misc_feature: Incyte ID No: 700454435H1
  unsure 63: a, t, c, g, or other
tgccaaaccgagcaacgaaaaaaaggtatcaccaaccggtggcggctgtcaaaaaacctactnccaccttccgccgctataaaccctacgaagagcggaagagggtaaaagggtggccagctagccgaagaaacacccagacgaagcggcgtttttggcatctcgtatgtgcaacttcgctggaaccctcctcgactgattttaccgcacagcagaaaaggagataaaacacgacaaaaattgaaggaaaacgcattcacatcttctcttcgtccgccgccgcc

SEQ ID NO: 4111 - DNA, 259 bp, Zea mays
  misc_feature: Incyte ID No: 700454437H1
  unsure 22, 40: a, t, c, g, or other
atcacgggggagttacccactncgctgggttgatgctcancctaaatacactccagagagcccaggagatgccaccaggaacctctcccagcagtgcctgaacgcccttgctaatgttgtgcctggtcttatcggaggcagtgctgatcttgcatcctccaacatgactctgctgaagatgtttggtgacttccagaaggatacagctgaagagcgcaatgtccgcttcggagtcagagagcacggaatgggcgccatt

SEQ ID NO: 4112 - DNA, 223 bp, Zea mays
  misc_feature: Incyte ID No: 700454438H1
  unsure 74-106: a, t, c, g, or other
gagttgcaagttggtgagatggatctgttggagcggaatattaagacggagacggaggagacgcgcaaggaacnnnnnnnnnnnnnnnnnnnnnnnnnnnnnnnnncggaggcgggggagaggaagacccaggagccgccgcagcaaggccagggccttcagccttcttcactcgccaacggcagtgggcaggtctggaatgttgccgatgttcgaacgtgtc

SEQ ID NO: 4113 - DNA, 278 bp, Zea mays
  misc_feature: Incyte ID No: 700454439H1
gttatccaatcgaagaattggctgaaagcagctcgtttgttgaggtggcctaccttttaatgtatgggaacttgcctactcagagtcaattggcaggctgggaatttgctatttctcagcattctgctgttccccaaggactgttggatatcatacaatcaatgcccatgatgctcaccccatgggtgttcttgccagtgcaatgagcaccctttctgtctttcatccagatgcaaaccctgctctacaaggtcaagatctttataaatcgaagcagg

SEQ ID NO: 4114 - DNA, 280 bp, Zea mays
  misc_feature: Incyte ID No: 700454440H1
  unsure 14, 118, 126: a, t, c, g, or other
tagcggtaagcggnacatggcggcggcgaagatagcgccgtcgatgctctcgtcggactttgccaacctcgcttcggaggctgagcgcatggtccgcctaggcgccgactggctacanctggacancatggatgggcacttcgttcctaacctgactattggggctccggtgatccagagcttgaggaaacataccaaagcatatttggactgccatcttatggtcacaaagccttcagattacgtagaaccatttggaaaggctggcgcttctggatca

SEQ ID NO: 4115 - DNA, 277 bp, Zea mays
  misc_feature: Incyte ID No: 700454443H1
gagtgcttgatctagatggcaatgagaatttggaaagctgttaccttgaagatatagggaagttatatcagttgcgatacctacggattaaggcaagtaatattacacttctggaaaggatagaagagcttcagtgtttggtaatatggatcttctgaattgccctaatctaggtgaattgcctagaagtattgttcaacttcggaacttgaaatggttaactgttcatcgagcgaacttgccagatggagttgggaacatgcaagcgctagagttt

SEQ ID NO: 4116 - DNA, 280 bp, Zea mays
  misc_feature: Incyte ID No: 700454444H1
  unsure 35, 81, 185: a, t, c, g, or other
gtgaggtaagcatccgaaaaaagctgtgatctgancgacatggccgccgccaccatggctctcacctcccgcgcgctcgtncggcaagccggcgaccagcaccagggacgtcttcggcgaggggcgcatcaccatgcgcaagactgctggcaagcccaagccagcggcgtccggcagcccctggncacggggccgaccgcgtcctgtacctgggcccgctgtccggccagcccccaagctacctgaccggcgagttccccggcgactacggctgggacac

SEQ ID NO: 4117 - DNA, 276 bp, Zea mays
  misc_feature: Incyte ID No: 700454445H1
gtgagtcctccctttccgtttaaggcagcaagcaggagcagacaggaggcgccgagagcccagcgtcggagatctccgccgccatggagacgctggccagcgccatgcggcgcgagaaccgccggtccaaggccccgccctcctctctgcttcctccgccctcgcctcgggcagggtccctctcgtcatggccttcctctcctgcctcgcctggctctacgtcgccggccgtttgtggcaggacgcgcagacccgggcgatcctgtccggcctcct

SEQ ID NO: 4118 - DNA, 277 bp, Zea mays
  misc_feature: Incyte ID No: 700454447H1
  unsure 2: a, t, c, g, or other
ancgcaccaaacatgccacaaaaccaggcctgcctggatgtgatggaggaaggcatattatgtggaggccaagctggtgttttgaaggaggccatggttttcaaggagctggtgatagcaccaacatcaaaggctcttgtccatgttttctttgcacaacgttccacgacaaaggtgccaggtgtaactgatgttcaactgaaaccaaggccaattagaaaagttgctgttattggtggtggtctgatgggatctggaattgccacatcacttcttg

SEQ ID NO: 4119 - DNA, 280 bp, Zea mays
  misc_feature: Incyte ID No: 700454448H1
agaaggagaaggccctagtcgagaagaagaagtccatcgagagccgcaagctcatcttcacccgcgcaaagcagtaacgccgaggaatacgatgcccaggagaaggaactggtgcagcttaagcgtgaggcccgtttgaagggtggtttctatgtcagtcctgaagcaaagctgctctttgtggtccgcatccggggtattaacgccatgcaccctaagaccaggaagatcttgcagcttctgcgattgaggcagatcttcaatggtgtgttcctcaaag

SEQ ID NO: 4120 - DNA, 281 bp, Zea mays
  misc_feature: Incyte ID No: 700454449H1
  unsure 106: a, t, c, g, or other
caacaaggggaggaacagcattgggatgcctgttctggcttttggccaggatggttctgcagatgaggggcactatcctccctgggcacaagtgggaggtcatgantggatttgttcttctacagggacccagaggaagcaaaggagcggaggaggaagctgctgttgcccctgagtttgccgcaatcactgattaccaaggagctgatcagtggggtggtgaccagtggacctctgatgtgactgcgccgcctgttgctcctactggtgctgattggggt

SEQ ID NO: 4121 - DNA, 281 bp, Zea mays
  misc_feature: Incyte ID No: 700454450H1
  unsure 46: a, t, c, g, or other
caaagtatgacatcaagctgaacaatgccattctcgctgaggagangcacttgcctatgtatgatgagttggctagcaacagcaatgttgaatatattgctggaggagccacccagaactctatcagggttgcccaatggatgcttcaaactcctggtgcaacaagttacatgggatgcattgggaaggacaagtttggtgaggagatgaagaaaaatgctcaagctgcaggagttactgctcattactatgaggatgagactgctcctactggcacatgt

SEQ ID NO: 4122 - DNA, 239 bp, Zea mays
  misc_feature: Incyte ID No: 700454451H1
  unsure 194: a, t, c, g, or other
ccctcccgcttcgtctcccttcctgggcttcctttcttcgccatggcaaccatgtccctccgctgcctgcgccatggccatggccgacaccgcgctcccgcccgcccacaagctcctccccacagtttccctcccgctcctctcctcgtccacccgcgccgcgccgctcctcctcttcgccaggcgccgctgcngctcgcgcccctcgttacctcctccgacgccgttgaggccaagtc

SEQ ID NO: 4123 - DNA, 278 bp, Zea mays
  misc_feature: Incyte ID No: 700454453H1
  unsure 212, 214-215: a, t, c, g, or other
gttttccgtaccgccgacatgtgaacgatttatatagggacttctctactactgctttaacacttctggactatctacttgcggtgtttgtcaattgagataatcttgggaaagagtgacagattcgatgagttgatggttgctgctgccgacgagaggggagaagttgaagatgaagagcaggcttgaaaaaacagtgccgaccatccctncnnacgcgtgacgcctcctacgggggccggcggaggcgtcacgcgtggcaggatggtcggcccccc

SEQ ID NO: 4124 - DNA, 282 bp, Zea mays
  misc_feature: Incyte ID No: 700454455H1
  unsure 8, 11, 31, 44, 64, 78, 105, 184, 189, 242, 257, 259-260, 277, 279-280: a, t, c, g, or other
gcagccgncgnccgctccgctacgcctccgntccggcagcgagntctatctcccgcgacgagcngcagctgccaccgncgcacgcagaccgggcaataaatattngtattggtagtgtgatatctataagaagtcaagatggtgaagttcacagctgaagagctccgcgctatgcatggacaanaagancaacattcgtaacatgtctgtcattgctcatgtggaccatggcaagtctacgnttacagattcccttntnngcagctgctgggattantnncc

SEQ ID NO: 4125 - DNA, 277 bp, Zea mays
  misc_feature: Incyte ID No: 700454456H1
  unsure 181, 207: a, t, c, g, or other
aacaggaaaggcgtgctgcaggtgcaggacggctctgagatccgggcttctcgtggagaacaaggcggagttcgctaggttcgtcgacgacaggttccggaagctcgacgccgatggcgacggtcggctgtcggtgaaagagctccagccggccgtcgctgacatcggtgccgccatcggntgccggccagagggtcgtcgccgcanggaacccacatctaacgcggaggtctaaacgagttcactcgcgggaagcaagagtcggtgggcaaggccg

SEQ ID NO: 4126 - DNA, 277 bp, Zea mays
  misc_feature: Incyte ID No: 700454458H1
  unsure 123: a, t, c, g, or other
cctaccccacacagaagcggcggcggcggagcaaaacgcaggcgaaggcgagggtgtgagggaaggagcaccagccatggtgcacgtcaacttctaccgcaactatggtaagacgttcaaganaaccaaggcgtccttatgagaaggagcgtcttgatgctgaactgaagctggttggtgagtatgggctgaggtgcaagcgtgactttggagggtccagtatgcactgagcaggatccgtaatgctgcaaggcattgctcacccttgacgagaaga

SEQ ID NO: 4127 - DNA, 277 bp, Zea mays
  misc_feature: Incyte ID No: 700454460H1
gaggacaatagggcaggtgaagccacccaaaaaggattttacaagtatgagggcaagaggaaagcgactcctgatcctgaaattatgaaatatattgaaaaatctaggagcatggcaggagttacaccagatcctgagctgatgaagctaagtgagaaagacatagtccgagatggtgtttttcccggtgataaatgaagcctgccgagtccttgatgagggtatcgccgtcaaggcttactgacctagacatcgcttcgatcttcggcatggggtt

SEQ ID NO: 4128 - DNA, 272 bp, Zea mays
  misc_feature: Incyte ID No: 700454461H1
agcgtcccagcccctacccgcttcctctcgcgccggcctttggggctctcaccctgagcggtaggaatccgcagggctccagttgggtgccagaagcatccaagttcgttggcgggagaccgggaaatggcggaaaaagagggggcgaaggttggggcggaagagatggaagagcgggagcaggaaggggaggcggaggaggtggaggtgaagtttcgtctcttcgacggctccgacatcggccccgtgcgctgcaacgccgccaccaccac

SEQ ID NO: 4129 - DNA, 273 bp, Zea mays
  misc_feature: Incyte ID No: 700454462H1
  unsure 110, 183, 188: a, t, c, g, or other
cccctccccgaccagatcgctacgagacgccgcgcgatccgacccaggccgacgccgacgacccctctcgccgccggggccatggcgtacggcgaccgcgtcaccacctncgaggactccgagaaggagagcgagtacggctatgtccgcaaggtctctggacctgtggttgtggctgatganatggntggtgctgtcatgtatgaagttgttcgtgtcggacatgataacctcattggggaaattatccgtcttgagggcgattcagctaca

SEQ ID NO: 4130 - DNA, 282 bp, Zea mays
  misc_feature: Incyte ID No: 700454464H1
  unsure 4-6, 12, 14, 16, 19, 25, 27, 60: a, t, c, g, or other
catnnnccaaancnancancgaaananaggtatcaccaaccggtggcggctgtcaaaaanccctactccaccttccgccgctataaaccctacgaagagcggaagagggtaaaagggtggccagctagccgaagaaacacccagacgaagcggccgtttttggcatctcgtatgtgcaacttcgctggaaccctcctcgactgattttaccgcacagcagaaaaggagataaaacacgacaaaaattgaaggaaaacgcattcacatcttctcttcgtccgc

SEQ ID NO: 4131 - DNA, 279 bp, Zea mays
  misc_feature: Incyte ID No: 700454465H1
  unsure 273: a, t, c, g, or other
ctattacctttctgctcgtggtgagtgctgacaccacctcacgcacacaagccgccggcggcgaccagaccgaccacctcgcgcactagccttgctcgcttctcgtcgccggctcgttgccggctcgtcggcacgatgtcgtcggagcctccacccgccccttctgccgccgcagcagagggactggctgctgacctttccgccgccaccctcagcaagaagcagcagaagaaggacgccaggaaggcggagaaggctgagaaggcggcgcangccagc

SEQ ID NO: 4132 - DNA, 278 bp, Zea mays
  misc_feature: Incyte ID No: 700454466H1
gtcttgggaacagaggttcaacgtcgcacttggagcggcccgtgcacttgcttaccttcaccatgattgccggccacagatcctgcacctcaacatcaagtcatccaacattatgttagatgggaaatacgaagctaagctatctgactatggattggggaagctgttgccgattctaggaagcattgaattgagtagaattcacaccgcaattgggtacattgctccggagctgtcatctccaactttgagatataacgacaagagtgatgtattta

SEQ ID NO: 4133 - DNA, 276 bp, Zea mays
  misc_feature: Incyte ID No: 700454467H1
  unsure 14, 30, 44, 52, 54-55, 83-84, 86, 98, 101, 103-104, 129, 144, 155, 171,199, 221, 230, 268: a, t, c, g, or other
cgcctcctggagangctgcccgcgctcganctctactacgccgnccacggcngnnggcggaggcgccgcgtgctcgtgcggcnngngtcggaggcgtnctngnnacaggagttcgccgctacggcagcnccatgtgcatactcnctccaggatanacgccggagacgtgangatgcggctgaagcagtgggcgcaggtngttacgctgtccatgctgagcngccactganctctaccgggccacggccgccgctaccttgtcgcattnggagtaga

SEQ ID NO: 4134 - DNA, 276 bp, Zea mays
  misc_feature: Incyte ID No: 700454468H1
aggaatttgggtttctgataccaagtgacaaagtttcaactggaagcagcattatgccccagaagaaaaatccagacccaatggagcttgttcgtgggaaatctgctagggttgttggagacctcatgactgttctaaccctctgtaaaggccttccacaggcctacaaccgtgaccttcaggaagacaaggaacccttgtttgatagtgtgaaagctgtattaggaatgcttgaagtatgcacagagtttgctcaaaatatctcttttaattcaa

SEQ ID NO: 4135 - DNA, 276 bp, Zea mays
  misc_feature: Incyte ID No: 700454469H1
  unsure 37-38, 71, 113, 139, 143, 159, 164, 176: a, t, c, g, or other
tactaccagaacatcccggccacgctcttctaccagnncctccgccgcctcaagcacctgcgtcaagttcnaccagtacagcctcaagttcaagctgcacgccaagttggggnagctgccaaactatgcggtgattgancagngtacttcgattgcganatgtncccagcaaacgntgaccatccgtcgcatgatgtggcgagggggcagaggttcgtgaaagaggtttatgagacactaagggccagtccgcatggaacgagaactgccctgatt

SEQ ID NO: 4136 - DNA, 274 bp, Zea mays
  misc_feature: Incyte ID No: 700454470H1
acagcacgcacggacgccatcgaggaaccctaacaagagcacgtcacacggggcgacggtttggcgccgcgccaccggcgaactggcggctggtgcagcagatggtaaattatttctcagactcagagtgcaagaaagttggttcgtccagggaagaggaatagaggttatggttttgtgtgagattgattagcatctgccttcaaatcattcccttggtatttattgagcactgcaagcggttgaggacttgaggtaaacatgctgaagtgca

SEQ ID NO: 4137 - DNA, 109 bp, Zea mays
  misc_feature: Incyte ID No: 700454471H1
tctgtgtatggaggctgcttgaattgcatgtagcacccaccgttggctaactatgaggtgtattttggatccttgcagtaagaatctcagaatctatgccctatgaaaa

SEQ ID NO: 4138 - DNA, 273 bp, Zea mays
  misc_feature: Incyte ID No: 700454473H1
  unsure 37: a, t, c, g, or other
agcacgcccacttgcctgcgattactttgcgccaganggcagaggccttggccctgccatcgttgttcttatccccccttcctctttctttctcctccctcttgctgcttctctctggactcgcccctccctccgtctcgtctcccagcctcccaggtcatggcaaagctggaacacccgtgaaaatagcaagtgggagataaacaggaagagctagggtgaatataatacaagtagcagtagaaggaagagagtcagtctgcccgtgactgc

SEQ ID NO: 4139 - DNA, 274 bp, Zea mays
  misc_feature: Incyte ID No: 700454474H1
  unsure 39, 81, 112-113, 143-144, 148, 151: a, t, c, g, or other
gcatcttgcctgcttatatgtgataatatggttgctatnttttcatcattcgtgaatagaatgttcacatgagctgaagtntacaattaatctagctaaggagttatatctnncttccttttggatttgtacttgctaaatannagtntantctagatggctcgtgtatgatctttccccctcttgtagttgtggagtccaaggacggaacgatctcagttgcttcagcatttgctggtcatcaggaagctgtgcaagacagggaccacaaatt

SEQ ID NO: 4140 - DNA, 272 bp, Zea mays
  misc_feature: Incyte ID No: 700454477H1
cattttgaaccctactccagagaagatacaacaatttccttaggacagacaaacaagtttaacattcgtgaggtgctctccagaatgggcattttcctatgagatcaccaaggtcatcattacgggagattttctgtgtgatccatcgaatttgtgttgggctgtgatgtttggtgacaatgaggtacccgttgaaatagttcagccaggtgttctccgctgtcacacaccactgcacagcaatgggaatctcagaatctgcatacttcggg

SEQ ID NO: 4141 - DNA, 271 bp, Zea mays
  misc_feature: Incyte ID No: 700454478H1
gcagcagcagaggattatagctttcattggaagtcctgtgaagtacgacaagaaagttttggagaccattgggaagaagctgaaaaagaacaatgttgctcttgacattgttgactttggtgaatccgatgatgaaaaacctgagaaactggaagcattgattgctgctgttaacagcagtgatagcagtcacattgttcatatccctcctggtgaaaatgccctctctgatgtcctcctaagcactcctatatttactggtgaagaaggt

SEQ ID NO: 4142 - DNA, 271 bp, Zea mays
  misc_feature: Incyte ID No: 700454479H1
ggcgatcacacgtttgtcccagtcactcggaagggatactggcagttcaacatgggtgatgtcctggttgatggaaagtccactgggttttgtgccggtggctgtgcagccatcgcagattctggaacttccttgcttgctggccccacagccataattactgaaatcaatgaaaagattggtgctgctggtgtagtcagccaggagtgcaagactgttgtttctcaatatggacagcagatcctagatcttttgctagctgagacacaac

SEQ ID NO: 4143 - DNA, 275 bp, Zea mays
  misc_feature: Incyte ID No: 700454482H1
  unsure 50, 73: a, t, c, g, or other
ctctctcgtgcgtgtgtactacttctgaggccgaaaggtcagaagagagngtccacctttcagttcgattttncgatgatttgagtccttccgccgcggggaatttgagcgttttccttgagaaatttgagtttcttcgagataatttgtgtgttttctcttgagagattcgtgcaaggatgtcgccttcgatccatttattgggtagtcaaattgttcctatatagcgtcaaagcatccaactttgacttctccgtggtggcttcttctatcgt

SEQ ID NO: 4144 - DNA, 273 bp, Zea mays
  misc_feature: Incyte ID No: 700454483H1
  unsure 50: a, t, c, g, or other
tcgagagcaagggagcgcggtgacgtcatcgttttccaaggtttctcgancggctgctatggcgaccagggcggcgtcgagattcctgcagcgcaggctcctgtcttccggcggcaaggtcctcagcgaggaggagaaggcgcggagaaagtgtacatcaagaaaatggaacaagagaagctggagaagctcgcacgcaagggccccagctcaggagagcaaccttcgtcgactacagtctctgcagcaagtgatgtgaagactggggctggg

SEQ ID NO: 4145 - DNA, 273 bp, Zea mays
  misc_feature: Incyte ID No: 700454484H1
gcagccgagcgactaagcgaagactcccttttccccgagcacaagagaaccatggcggcggcggcagtttacggcggcttcaaagggaagcttggcgtcgaggatgcccccgagctgcagctcaaccgcatccgcatcacactctcatccaagaacgtcaagaacttggagaaagtttgtgcggatttggtaaagggagccaaggacaagcatttgagggttaagggacctgtccggatccctactaaggttctccacatcaccactcgcaag

SEQ ID NO: 4146 - DNA, 270 bp, Zea mays
  misc_feature: Incyte ID No: 700454485H1
gctgcttacagaaccaatgaatttcccgcgttcttcacagaaattagtggatgccaggtgccatgtcgtgttgattctccagaagagtgtgccaaaataatatatgcaaacaagaacctacgtcttggttctgggattctattgcagtaccgatccccaagcagcatgcaacttcagggaaaattatagagtctgcaatacagacagctctaaaagaggcaggggataaaaggataataggaaatgcgatcactcccttcatgcttgaaa

SEQ ID NO: 4147 - DNA, 271 bp, Zea mays
  misc_feature: Incyte ID No: 700454486H1
gaaaataataagaaatcacaagctcagagagagagggcaagggcaacatcagacatatgctcttggaattaaggaggtttgggagattgaagaaggaaagcacaatccaggttctgttattcatactgttggatggcctttggatactaaaacatatggaggatcattcctgtaccaccttgatgatagacagttggcaattggtctggttgttgcgttgaattatcgaaatccgtttctgagtccctatgatgaattccagaaatttaag

SEQ ID NO: 4148 - DNA, 268 bp, Zea mays
  misc_feature: Incyte ID No: 700454490H1
  unsure 83: a, t, c, g, or other
ccacctgttgctcctactggtgctgattggggtgctgctccggctccagttcctaccggtgaaggctgggatcaagccggggnccctgtacctgcggacggcactgtacctccagtggttgctcctactggttgggacaagcagccccgccgacagcccaaggctgggagtaggcatagtctactatgagacctgtcttatgcagcttaagttcagtattttttgtgaagtctagtcttctgcagcttaagttcagtatttttgtgaa

SEQ ID NO: 4149 - DNA, 272 bp, Zea mays
  misc_feature: Incyte ID No: 700454492H1
  unsure 145: a, t, c, g, or other
gaagaagctggcgagcaccaaggccacggacagcaacggcctcaagtgcgccattgatcacatactgtaggcacagcagaagggtgagatcaacgaggacaacgtgctcttcatcgtcgagaacattaacgttgcagcgatcganaccacgctgtggtcgattcgagtgggcggtcgctgagctggtgaaccacccggagatccagcagaagctgcggcaggagctggacacggtgctcgggccgggccaccagatcacggagccggacacg

SEQ ID NO: 4150 - DNA, 269 bp, Zea mays
  misc_feature: Incyte ID No: 700454495H1
ctcaacatcatgggtgttaagtccggatccccgatgcaagggcctgcggtgcgctacctaacgataaggtcccttggtgcccccgctgtgctgctgtctctggccatgcaaggggttttccgggggttcaaggacaccaagacaccgttatacgctactgtggttggcgacgcggcgaacatcatactggacccgattttgatgtttgtttgccatatgggcgtcactggtgcggctattgctcatgttgtttctcagtacatgataac

SEQ ID NO: 4151 - DNA, 103 bp, Zea mays
  misc_feature: Incyte ID No: 700454501H1
  unsure 38, 48, 66, 76, 78, 98: a, t, c, g, or other
cgttactttgattactgttacctggtaaccccagtggngaaataccgnactttgattaccataccncaggccacgncncatttccaggaagataccgnctttg

SEQ ID NO: 4152 - DNA, 189 bp, Zea mays
  misc_feature: Incyte ID No: 700454503H1
  unsure 21, 25, 60, 68, 78, 84, 113, 131, 137, 150, 160, 168, 170, 173, 178-180,182: a, t, c, g, or other
tggcgacccagatcagcaagnagangaagttacgtacagcgaggtgttttctacgccganctacatgngatgctgacncgggantggcggaggatggctactctggcgtggangtgcgcgtcagccgatgngcacgnagatcatcatccncgccacgcangacaaaancntcncgaannnanggccgca

SEQ ID NO: 4153 - DNA, 197 bp, Zea mays
  misc_feature: Incyte ID No: 700454504H1
  unsure 10, 14, 52, 61, 69, 132, 144, 153, 155, 172-173, 182, 188, 192: a, t, c, g, or other
tggacaagcngctnaagaaacgggacgcacacttgccgaactaacaacatcncaaaggagnagcacccnccaccttgttctccgcctcaggggaggcatgcagatcttcgtacaagaccctcactggaaagnctatacaccctngaggtggantnttctgacaccatcgacnncgtcggggncaaagntcgngaggg

SEQ ID NO: 4154 - DNA, 196 bp, Zea mays
  misc_feature: Incyte ID No: 700454506H1
  unsure 33, 65-66, 95-96, 103, 128: a, t, c, g, or other
catgtacaacctttagacaattgacctagtggnaaagatgctaaacttttgatcctagacagcgnntaactgttgaaggcgcacttgcacacccnnacttggncatcacttcatgacataagtgatgngccagtctgactccaatgcccttacagcttcgacttcgagcagcatgcattatctgaagaacgtgagg

SEQ ID NO: 4155 - DNA, 197 bp, Zea mays
  misc_feature: Incyte ID No: 700454510H1
  unsure 38, 59, 78, 115, 143, 183, 194: a, t, c, g, or other
gggggaggttctgccaaaatctgactcctgtgaacatngatttctacaaggggaggttnctgccaaaatttcctcccngtaaccaccagctttccagggggagattctgccaaantttcctgcactgatcatcattcttctanggggaggttctgccgaagttttcttgtgtgacgacgacgntacagtttccnggg

SEQ ID NO: 4156 - DNA, 192 bp, Zea mays
  misc_feature: Incyte ID No: 700454511H1
  unsure 3, 6, 8, 56, 68, 73, 83, 94, 154, 157, 163-164, 174: a, t, c, g, or other
tcngcntncgagcactacgacccgctcagtcacaaagcctcagatctcatacgctnagccgcgcttcnttcgngtggaggggngaagacagganatggcggcgactgagggcgtgctcttggggatgggcaaccccctcctcgacatctccgcngtngtcgannaagccttctnacaaagtatgactcgcgt

SEQ ID NO: 4157 - DNA, 196 bp, Zea mays
  misc_feature: Incyte ID No: 700454513H1
  unsure 28-30, 37, 42, 49, 53, 126, 168-169, 186: a, t, c, g, or other
cattattgccgtactcccttttgcgtgnnnacgtacnagagngcgagangcantcgccatgtctggcatcatccacaagatcgaggagaagctccacatggggggcgaccacaagaataaggaggnggagcaccacaagaaggccgaggagcaccacaagaaggaggnnggggagcaccacaaganggacgcgggg

SEQ ID NO: 4158 - DNA, 203 bp, Zea mays
  misc_feature: Incyte ID No: 700454515H1
  unsure 5, 10, 24, 45, 48, 65, 93, 103, 106, 125-126, 168, 184: a, t, c, g, or other
gaaangctangggaaaaagcaggncttttcttgaacaaactaacnggnagttcccaatgtttgcngacaattatctatactgaatttgatgantctcgagagntcntagagagcctagttgatgnntacaaggcctgcgagtcgcctgcactaacatcaaatggggantggaggaccctggagnggcaaatgttgtgcggccc

SEQ ID NO: 4159 - DNA, 193 bp, Zea mays
  misc_feature: Incyte ID No: 700454516H1
  unsure 3-4, 25, 27, 49, 55, 76, 80, 89, 92, 185: a, t, c, g, or other
gcnnccagatcccaagttcaccggngngggggaagagggcgaccgaagncggcgntgggtttcatcatggacttcncggngaatctganccnccgtctgatggaggacccggacaagcgcgaccaggttcggcgggacatgtctacaagatgaaggagcggtgcagcgcactaaggcggcgtggngctccctc

SEQ ID NO: 4160 - DNA, 203 bp, Zea mays
  misc_feature: Incyte ID No: 700454517H1
  unsure 7, 79, 124, 142, 146, 160, 167, 170, 172, 183, 185, 192, 194, 202: a, t, c, g, or other
gacgaangagtagcagcagcaggcggacgccaaaatagcggtaccccaacctacgaagcttgccaccatggctagaggnttgaagaagcatttgaagaggcttcaatacgcccaggcattggantgctggaacaggcttggngacnttttgctcccaaanccatctnccngnacctccacaantntagggantncctacccnt

SEQ ID NO: 4161 - DNA, 200 bp, Zea mays
  misc_feature: Incyte ID No: 700454518H1
  unsure 21, 66, 86, 90, 95, 108, 114, 120, 122, 138, 143, 146, 160, 174, 176,179-180, 183, 187: a, t, c, g, or other
tacaaggtgaagttcttctcnttatgtatctatatacagcttagctgtggatatgcgtgtgagtcntaaaatttcgatatatgaanagtncagtncttgcataccgancagganttgtgnanctctctttactaacanatgcntcncttacgaagaggtngggggatatgaccnancgnnaancatntaactacaagcgg

SEQ ID NO: 4162 - DNA, 193 bp, Zea mays
  misc_feature: Incyte ID No: 700454519H1
  unsure 4, 17, 51, 56-57, 69, 107, 130, 149, 152, 154, 167, 170, 173, 184,190-191: a, t, c, g, or other
gacntccgtgttctccnagatacaaacaggttcgaggaggagctgacgcgnggcgnnccccaggggagntggaggccgcccgcgtggcttcgagaccggcgcgcgcnaatcgccaaacaggatcaagganagccggtcgtacccgctanacngnttcatccgccagnacntcnggcgccgtgtncctaanngg

SEQ ID NO: 4163 - DNA, 194 bp, Zea mays
  misc_feature: Incyte ID No: 700454521H1
  unsure 31, 55, 91, 136, 139, 145, 158, 176, 180, 184, 188-189, 192: a, t, c, g, or other
caggcaggcaggtcggcgaggagggcaggangaccgaagaaccgagccgtgcganggctcgagaacgggaaacgggaacaggaccccaaantctcagatccttcctgacccgcccgcccgtgcccgtcgacgcgtnttnttgacnggccgcgctacanctccgccctctactaccnccangggnttcnnttnca

SEQ ID NO: 4164 - DNA, 122 bp, Zea mays
  misc_feature: Incyte ID No: 700454525H1
  unsure 32, 50, 56, 96, 99-100, 103: a, t, c, g, or other
ttttgagtctgtaacgttagtgtttgtagcangtttctatttcggatctnagtttntgcactgtagccaaatttctttcaagagtggttcgttggnatnntangaataataaattacgtttc

SEQ ID NO: 4165 - DNA, 190 bp, Zea mays
  misc_feature: Incyte ID No: 700454526H1
  unsure 2, 4, 6, 9, 11, 15, 19, 32, 52, 65, 70, 73, 104, 114, 137-138, 147, 152,156, 178: a, t, c, g, or other
tntngntcncnagcnaccncccgcgaatctanggaaactaggatgatacctntgatgccacaggnggcgnccngtgctcccttggagggtcagatatgtacggntttctccaanttgatcagcttggaggtgaagannggcctccanaagtntgcnacgttcccaccctacatactgntcagcctcagca

SEQ ID NO: 4166 - DNA, 200 bp, Zea mays
  misc_feature: Incyte ID No: 700454527H1
  unsure 55, 59, 160, 177, 180: a, t, c, g, or other
ggacttgtctcccccgagtgtcgtgtacgcacacctgaggcctacctacctacgnacgnactcggctacccccctagagccgtgtacgacacgcctacaggtacttactgttactccgaggttcctttggattggttctgctcaaggtttacgagggttnccaatctctttctctgngcncgtgatgtcaaaaggtccat

SEQ ID NO: 4167 - DNA, 140 bp, Zea mays
  misc_feature: Incyte ID No: 700454528H1
  unsure 18, 60, 78, 109, 118: a, t, c, g, or other
ttgtatatgccacactcncatacacatacctgacaaaggaaacccaactgccgctttgantacttggtggttgacaanaccatgtctacacccgttacatgctggatcntgttggagnactcattgtgggtggatagggc

SEQ ID NO: 4168 - DNA, 210 bp, Zea mays
  misc_feature: Incyte ID No: 700454531H1
  unsure 6, 22-23, 25, 43, 64, 67, 80, 88-89, 99, 101, 111, 114, 121, 126, 175,182, 188, 194, 196: a, t, c, g, or other
cccgancctacatcgtcgacgnngncggcgagcacggacctgnctacatcccaacgagggtgtnaanggccgaaggcggngtacgagnngaccggacangntccccgaacncgnagtccancgacnacgctgagttcaagatcgtgctacaccatacatccgcgacgggcttcanggctganccccangacgtncngcaagatgaggaga

SEQ ID NO: 4169 - DNA, 201 bp, Zea mays
  misc_feature: Incyte ID No: 700454532H1
  unsure 34, 67, 103, 111, 137, 176, 188, 195, 199: a, t, c, g, or other
ggaggtccgtagctgactacatcccgtggcatgntcttgagatcggtacctgatgctcctgctgttntcaatgttgttgttgagatcacaaagggaagccaanggaaaatntgagctcgaacaagaaaactggactnattaaggttgatccgagtcctgtactcatcagttgaatnccccacacaatnatggttncgtncc

SEQ ID NO: 4170 - DNA, 186 bp, Zea mays
  misc_feature: Incyte ID No: 700454533H1
  unsure 3, 29, 46, 59, 62, 85, 119, 125, 140, 151, 154, 170, 179: a, t, c, g, or other
gcntaccagaattcagccatctcactggnggggatctgcttggacngtgactacgtagnaantacctgagaggctacctctcctncggggatcgaacttctggccgggcaaggagtagncttctngtcggccttccctanacctctacctntgntgctgctggtggtggntccacgatnggtaggg

SEQ ID NO: 4171 - DNA, 103 bp, Zea mays
  misc_feature: Incyte ID No: 700454535H1
  unsure 56, 82: a, t, c, g, or other
gtactacgacctactacccttggttacctacgacggacgaacgaactgggccgagncgcctaccttcccctaccctacactncccctaccgtgagctccctac

SEQ ID NO: 4172 - DNA, 193 bp, Zea mays
  misc_feature: Incyte ID No: 700454540H1
  unsure 52, 60, 100-101, 124, 140, 179, 190: a, t, c, g, or other
caatccccagaatggcttcaaactttgggaaccagaccctactgttaccatncaggtggnttcaactttggctgaagatgcccatttggaatggccgctnngcgcaaaaaagccttggctagtncctctgggctagtcanaggtgtgggtagcggcgtcatggtagtcatggttgagtnccattggtcgntat

SEQ ID NO: 4173 - DNA, 196 bp, Zea mays
  misc_feature: Incyte ID No: 700454541H1
  unsure 12, 43, 49, 59, 67, 75, 78, 82, 88, 109, 118, 126, 133, 149, 152, 158,162, 190: a, t, c, g, or other
cgccgaaccgcnacaaccgacagacaacgggactacgggagcngccgangcccgaccgncccgaganattcaagntanaagnttttgnagccttttcaagtcttaaganctcggtagntaaatttnccttgcntcatcatctcatgaancgngaagcntgcngtcgtgtaagtcctgcgatcctaactgntatggc

SEQ ID NO: 4174 - DNA, 188 bp, Zea mays
  misc_feature: Incyte ID No: 700454544H1
  unsure 16, 19, 26, 32, 43, 46, 52, 127, 155, 161, 170, 173, 175, 187: a, t, c, g, or other
cttggcacctgaaggntgnacatatntttggntctgttggggntgnctgtangttgatgatgtgggacttgcgtacaaacaaaccagaacaatctattcttgcacatcgaaagggggtcaactcttngtcattcaatccattcaatgaatggatnttggcnacagctacnggngncacaacttcatnt

SEQ ID NO: 4175 - DNA, 196 bp, Zea mays
  misc_feature: Incyte ID No: 700454545H1
  unsure 8, 95, 97, 119, 143, 148, 153, 162, 183, 189-190: a, t, c, g, or other
ggaaaagnaagttactattgattttgagccattcaagcctatcaatgtgtacatactaactttgtgacaacaagtttccacactgaggctttaantnagctacttggaatactgatgancaagtttgggttcattgttatggntggtnatggnactcttttnggccacactaaagtggcaatnacccgnnagtgct

SEQ ID NO: 4176 - DNA, 175 bp, Zea mays
  misc_feature: Incyte ID No: 700454546H1
  unsure 67, 75, 83, 121, 172: a, t, c, g, or other
acagatgtgtgtgtgcagtgtgctagagagtggcgataagagtctgtccagatagccaggatgattnccgtggtncttggctncttggctcgggctgattaaaccttgtgcagttttattnctctcccgtggcctcgatcacggcatctccttggctagtccgggcagcccnatc

SEQ ID NO: 4177 - DNA, 147 bp, Zea mays
  misc_feature: Incyte ID No: 700454547H1
  unsure 13, 31, 39, 49, 54, 56, 78, 92, 103, 107, 122, 126-127, 130, 135, 139,146: a, t, c, g, or other
gacgacggtgcgngacagcgatctagactgnggctgagnagctaactangctancngctggctaccaagtactccctnatcatggtgccgtncgaaccatccnaagncatcgagagcccaangcannccnaattntcgngcaaggnc

SEQ ID NO: 4178 - DNA, 92 bp, Zea mays
  misc_feature: Incyte ID No: 700454549H1
  unsure 6, 11, 13, 31, 53, 57, 59, 72, 80, 83, 88: a, t, c, g, or other
cgcatnttcgngntggtgccgctgttgtacngtaaccttgacttggctggatnctcngntgccggagaactntggagccnacnggttntttc

SEQ ID NO: 4179 - DNA, 188 bp, Zea mays
  misc_feature: Incyte ID No: 700454550H1
  unsure 5, 19, 23, 34, 48, 59, 62, 66-67, 71, 73, 75, 93-94, 104, 141, 145, 158,166, 170, 185-186: a, t, c, g, or other
gttcnttctttttgcttcntgcntgtgctcatantcccaaccggtgtngctcctacggnggncacnntggngngnaatatcccatcagttacnnggtgaacaanccttttccattctttgaactggaataccagggtttgnccantggtgatcccagngagagatncaanggccatccgaatttnntt

SEQ ID NO: 4180 - DNA, 189 bp, Zea mays
  misc_feature: Incyte ID No: 700454559H1
  unsure 18, 22, 24, 27-28, 44, 68, 87, 95, 157, 165-166, 177, 180, 185: a, t, c, g, or other
gtttcttggacgggacanagananggnngaaggtactcaacggngtgcacatctctggtcaacagctnatgatgaagcttgagaagncaacggangacaaggcagcagagagcaagcgaaacgaactgttgaagtttctgaatgccattacgattgntgtgttcnntttcgctggcncanaaatncaaa

SEQ ID NO: 4181 - DNA, 192 bp, Zea mays
  misc_feature: Incyte ID No: 700454560H1
  unsure 58, 67, 80, 107: a, t, c, g, or other
ttcctcctaccggatttcgcagtacagcggtggtgcaggtagcgggcgcggaggaagntggggctcncgttcgggaagcncttcagccggctcttcgccaagaaggngatgcggattcttatggtccggtctacgacaccgaccggtaaaaccaccatcctctacaagctcaagtacggcgaaatctccaca

SEQ ID NO: 4182 - DNA, 185 bp, Zea mays
  misc_feature: Incyte ID No: 700454562H1
  unsure 2, 33, 49, 68, 84, 149, 157, 173, 176: a, t, c, g, or other
gngcgatcgttggaaacttatgcgcatgggagnagatccaccagttgcnggctggattgctgtaatcnggctgatgaagctgtnattggactcaatccatggtgctcactgttgattctgctcaaagatatgcgaactcttttcaaagnggcaccanactttgtttcagcttnctnctgtttggt

SEQ ID NO: 4183 - DNA, 190 bp, Zea mays
  misc_feature: Incyte ID No: 700454564H1
  unsure 6, 15-16, 74, 93, 107, 114, 147, 153, 161, 171, 182, 185-186: a, t, c, g, or other
gaagantgctgaagnntggatgattgattacgcgcttaggagggcggtgaccaaacttagctcctgctacggangacgaaagtggagctcccntgtccgggccttcnagactgncctaccacatgacgagatgacagaaaaatgtcncacccncaaggccngtccaagccngcaactgatancgnngggt

SEQ ID NO: 4184 - DNA, 177 bp, Zea mays
  misc_feature: Incyte ID No: 700454567H1
  unsure 61-62, 65, 71, 73, 75, 92, 98, 101-102, 125, 128-129, 168, 171-172: a, t, c, g, or other
gttcattctttttgcttcatgcatgtgctcataatcccaccggtgtagatcctacggaggnncantggagngnantatcccatccagttccnggtganaanncttttccttctttgactggcatnccnngggtttgccgtggtgatccagagagcgctgccaaggcgntcnnttttc

SEQ ID NO: 4185 - DNA, 175 bp, Zea mays
  misc_feature: Incyte ID No: 700454569H1
  unsure 9, 11, 16, 53, 64, 88-89, 91, 93, 100, 105, 108, 110, 112-113, 123, 125,139, 146, 153, 159: a, t, c, g, or other
ctcgagcananaaagntgtgggggcttgttctgcagcagctgcacccagcagnggatggttttnacgtggaccgggtgattcacctannanantttgtanatccntgncnannagcttgaggnancagcacgaccatgngttgagntatgggncacacnaatagagctacaggag

SEQ ID NO: 4186 - DNA, 185 bp, Zea mays
  misc_feature: Incyte ID No: 700454570H1
  unsure 5-6, 18, 20, 25, 31, 43, 60, 141, 181: a, t, c, g, or other
cttgnngcaggactgganantgtgnaaccanttttgtccaagntccgcgagtttattacngcacataccattcaaaccaggagatgatggaggattttaagcactggcactgaagtttatcaagaaggttcatggaaactncccctttgaccttccagcaaattggaacagtgattctatngttg

SEQ ID NO: 4187 - DNA, 188 bp, Zea mays
  misc_feature: Incyte ID No: 700454571H1
  unsure 49, 73, 117, 120-121, 124-126, 139, 142, 175, 184: a, t, c, g, or other
cgcagagaagctgaggtctgactacgactttggccacactttgcatgcnaaccacctacccacgtggtgatgncgcagtggaaggacccattggtcaggctgctgaagccatttgangcnncannntgttgaacagccnggnttttgatgtcgctgccactgatgaagtttattnatgctagcncctc

SEQ ID NO: 4188 - DNA, 169 bp, Zea mays
  misc_feature: Incyte ID No: 700454573H1
  unsure 44, 61, 70, 133, 144-145: a, t, c, g, or other
ctcccgcaaactgccgccgccactcccacgctcgcagccatgcngcccaagtcaaccgtcncagtggtgnaggtgttcgtcgtgtgaccggcggcgaggtcggcgcgtcttcgtgacccccaagatcggccgntcggttttccnnaaaagatcgaaagactcgccgggg

SEQ ID NO: 4189 - DNA, 256 bp, Zea mays
  misc_feature: Incyte ID No: 700454576H1
  unsure 52, 56, 77, 88, 115, 127, 135, 137, 148, 158, 174, 191, 193, 203, 211,216, 229, 232, 234, 236, 243, 248, 251: a, t, c, g, or other
ggtttttggagagagtttcttgtacacttacaaacataacaacaaaactggncctnccaaatttacatttttacatngcggcttggantggccactacaagggacatgggacagntcagaaggacgncctgaccnancctggttaganggttccctgnctgaccagccacaacnttgggaaagtttcccananagatcacagncttatacnagaanccagggttcatcnacntnancctgaangaatnatnatctt

SEQ ID NO: 4190 - DNA, 190 bp, Zea mays
  misc_feature: Incyte ID No: 700454579H1
  unsure 35, 59, 64, 71, 73: a, t, c, g, or other
gtgcgtgcaatcgacgcagaggcgcgggcgctacncactaccacaaccacgacccgatngcttncatgcgncncccgctacaaatgcatcttctggcatgggagttgctcctaacattagggagacattcgttgagcttcactgaagaaggcattccgatatgttatcttcaaaatcgaagagagcaaaa

SEQ ID NO: 4191 - DNA, 203 bp, Zea mays
  misc_feature: Incyte ID No: 700454582H1
  unsure 63, 66, 87, 117, 129, 134, 140, 150-151, 154, 158, 163, 185: a, t, c, g, or other
acagacagtaccagacaacgactagacggaataatataccaccggcgaagggcaacgggaggngancgcggacgaaagcatttcgangacgaatgggcgttacacgatgcgggccantgaaggtgcctnccganctcggncctcgactgnnaanagancccgnacacccagtcttagatttcttncaagcgggcatgcgttct

SEQ ID NO: 4192 - DNA, 117 bp, Zea mays
  misc_feature: Incyte ID No: 700454584H1
  unsure 13, 18-19, 22, 40-41, 63, 71, 73, 75, 82-84, 88: a, t, c, g, or other
cgcacccccggcngccgnnacncgcccagtccccgtcggnnccttcggcaggtcttcttcggncccttcgncngngacgagnnnaaancaggggtaacatgtgtgcacccaggccct

SEQ ID NO: 4193 - DNA, 185 bp, Zea mays
  misc_feature: Incyte ID No: 700454585H1
  unsure 4, 118, 172, 176, 178-182: a, t, c, g, or other
gcgnactcgggcaagttctccatggaggaaggccgcaacaggctgttccgggagctacaccgacatcaacgcgggactcctacggagggttcccacatcccaggactaattcccctancctgggccggatcgagctcgtcaggaaggtggcgtgcgccagaccaggagcgtngggntnnnnncaa

SEQ ID NO: 4194 - DNA, 174 bp, Zea mays
  misc_feature: Incyte ID No: 700454586H1
  unsure 35, 54, 62, 129, 145, 166, 168: a, t, c, g, or other
caagcgcactctagcaatggcttctgaggttgtcncaacctagcgacgccgaanctactaanggcacaagccgacatatggcggtcagctactcctacctcacgcccctgtcactgaggtgcgccgtgnagcttggcatccctanggcgatctaccgaccatgggngntgccct

SEQ ID NO: 4195 - DNA, 286 bp, Zea mays
  misc_feature: Incyte ID No: 700454587H1
  unsure 2, 23-24, 30, 41-42, 54, 62, 65, 67, 70, 112, 114, 122, 134, 143, 146,166, 190, 196, 202, 213, 222, 237, 241, 247, 249, 258-259, 269, 283: a, t, c, g, or other
cnaaacctagaacaagtactggnntaccgnccgataaaganncggcggcttganaacgaagnctngncgngggccacaaagccaggcggaaaattggggaacaaaaaccaangncttcccgngaagggccaaangacaggganatnccaacggggaaacccttaancttacgcccaaccataaaggtggnaccttnccatcncccatttaagngcccgcccnggggccttgagggcnagcncccaancncaaaggttnnattggggaangccaaaaggattgngtt

SEQ ID NO: 4196 - DNA, 190 bp, Zea mays
  misc_feature: Incyte ID No: 700454588H1
  unsure 53, 99, 120, 122, 143, 189: a, t, c, g, or other
ctggacttgggtcacttttattggagcgcctttacagttgattatggccaganataccaagcttggtttcacctttataccttccccacaggtgtacancagcctgttgtagagcctacnancagtgtcctactaccacccantaccttgattgagcacactgctgttgcagtcctcctggacaacgang

SEQ ID NO: 4197 - DNA, 186 bp, Zea mays
  misc_feature: Incyte ID No: 700454589H1
  unsure 10-11, 18-19, 23, 60, 97, 103, 144, 146-147, 159-160, 170, 175, 178: a, t, c, g, or other
ctgaaaaagnngcgggtnnaagnagacgcgcaacaacttgctcgagtttttgaaaccttngcgctttcaaactccctcgacaaaggtggaaaagganaacagnttctttgggagtgtcacggcacaggatgttgttgaacatantnncgtcacaacttnntagggatgtncgacnagnagcggtgc

SEQ ID NO: 4198 - DNA, 179 bp, Zea mays
  misc_feature: Incyte ID No: 700454591H1
  unsure 56, 98, 102, 142, 173, 178: a, t, c, g, or other
acgaaaaagcactcgcaccatcctttccgtaaaatgccaggccttcctgttgctgncaacttcctccaagtccggaagatgttctttgttgctactangaantttgttcgattttgatctccaaaaagcgcgttggtaaagnagctggagtcaggtcttcgcgagatttcctncatcnc

SEQ ID NO: 4199 - DNA, 187 bp, Zea mays
  misc_feature: Incyte ID No: 700454592H1
  unsure 67: a, t, c, g, or other
gttcattctttttgcttcatgcatgtgctacataatcccaccggtgtagatacctacggaggaaacnatggagagaaatatcccatacagttcaaggtgaaaaaacattttccattctttgactggcataccaagggtttgccagtggtgatccagagagagatgccaaggcaatccgaatttcctt

SEQ ID NO: 4200 - DNA, 191 bp, Zea mays
  misc_feature: Incyte ID No: 700454593H1
  unsure 7, 46, 62, 70: a, t, c, g, or other
gttcatnctttttgcttcatgcatgtgctcataatcccaccgggtngtaagatcctaacggnaggacacnatgggaggagaaatatacccatcagttcaaggtgaaaaaacattttccattctttgacatggcataccaagggtttgccgtggtgatccagagagagatgccaggcatccgaatttccttg

SEQ ID NO: 4201 - DNA, 186 bp, Zea mays
  misc_feature: Incyte ID No: 700454594H1
  unsure 30, 61, 66, 122, 138, 150, 152, 154, 172: a, t, c, g, or other
caagcgcctttccagcatcaatgtcgaganacgttgaggagaaacgccgtgccctaccgtnagctnctattctgctgccctggtgctctccagtacatcagcggtgtgatcctcttcgaganaccctgtaccagaagnccaaggctggcnancnttttgttgatgtctacanggggggaggcgtcc

SEQ ID NO: 4202 - DNA, 184 bp, Zea mays
  misc_feature: Incyte ID No: 700454595H1
  unsure 8, 52, 62, 84, 170: a, t, c, g, or other
cacgaaanagcactcgcaccatacctttccgtaaaatgcccggccttcctgntgctgcaacntccatccaagtcagaagatgtnctttgttgctactaagaaatttgttcagatttatgatctccaaaaagcgcgttggtaaagaagctggagtcggtctcgcgagattncctccatctcgatt

SEQ ID NO: 4203 - DNA, 191 bp, Zea mays
  misc_feature: Incyte ID No: 700454601H1
  unsure 32, 107, 115, 118, 121: a, t, c, g, or other
ctgctatgttgctcgcgtgcaagtatgaagangtgagcgtacctgtggtcgaggatctgatacttgatactgtgatcgtgccatacacaagggctgaacattcttgngatggagnggnggntagtgaacacacttaatttcaatatgtcggtgccgactaccatactgtttcatgagaaggttctaaaggc

SEQ ID NO: 4204 - DNA, 188 bp, Zea mays
  misc_feature: Incyte ID No: 700454602H1
  unsure 40, 46, 108: a, t, c, g, or other
gccactcatacaacctaaacctacacactggttctgatgntgaggntgatgatctgcttctgacactacaagagaaaaccatggatactggttactcccttctaacanttcagtaaagcaaatacgtgcgggagacttctattgtaacgaccagacgagtatttgaacggattgtagttcgtctgttt

SEQ ID NO: 4205 - DNA, 185 bp, Zea mays
  misc_feature: Incyte ID No: 700454603H1
  unsure 80, 176: a, t, c, g, or other
gttggtgacccaagctgtgcaaagtctacagttcctaaaatataactgctggtattgttccaagatctgtttacacgtangggaagtcatcatcagctgctggtctgacagcaactgttgctaaagaaccagagactggtgaattctgtattggcagctggtgccctgatgctagntgataatgg

SEQ ID NO: 4206 - DNA, 187 bp, Zea mays
  misc_feature: Incyte ID No: 700454607H1
  unsure 31-32, 84, 98, 102, 109, 148, 150: a, t, c, g, or other
gtgagatcctccccgaacgagatggcggggnngggagccaaggccacggccgcacaagtcggggaacaaggacaaggggaaganggccggcggcccgnctcncgctccncccgcgccgcacctacaggagaattcaactccgaagaangntgtttatcaattgttcgctgagaaggttagggataac

SEQ ID NO: 4207 - DNA, 185 bp, Zea mays
  misc_feature: Incyte ID No: 700454608H1
  unsure 54, 57, 105, 126-128, 130-131, 170, 182: a, t, c, g, or other
tagttctcgatcgcgagcggaccgccctttttttagctttcttacgaacaagtnatnatggtgctgaaccaacacagatgtgctactaaacacatctaacgagtnaaacgccgaagcatatacccnnngnncaaccccggttaatcttgttacccatggattgaatgagnttgaaaaaattnaga

SEQ ID NO: 4208 - DNA, 190 bp, Zea mays
  misc_feature: Incyte ID No: 700454609H1
  unsure 9, 31, 37, 135, 137, 140, 163: a, t, c, g, or other
ctacgagcnaaaaacattactaatacaggantttganaggcgaattgcttttagtaaacagcagattgctagcttcatacaaaacccacatttttagtcggaggcgtacctatacgatggatggaagtacatgancngangaaattggaccccaacgcaaganaaggaaaggggagtgtgcaagattacc

SEQ ID NO: 4209 - DNA, 187 bp, Zea mays
  misc_feature: Incyte ID No: 700454610H1
  unsure 23, 44, 46, 51, 123, 178: a, t, c, g, or other
ggagctcttctactacttcgtcnaggccgagtccggcgaccgananaccgncgatgaacacccctttactcttctggctcaccggcggcgaccgctgctaccgtcttcagcggcctcgcctancgagatcggtcccatcagattcgtcctggaaccctacaacggcaccctgcgacgnctgagatac

SEQ ID NO: 4210 - DNA, 187 bp, Zea mays
  misc_feature: Incyte ID No: 700454611H1
  unsure 25, 118: a, t, c, g, or other
tatcgtagaagtaaagccgacggangttagacaagggtcgtgctgtcgacaagctgattcaagcactggccaacaacaacgggaaggcacaggatttcctgatgtgcgtcggcaacgnagatactgacgaggacatgttcgaatgcatcaacggtatggcctccaacgatgtctacatgaaccacag

SEQ ID NO: 4211 - DNA, 49 bp, Zea mays
  misc_feature: Incyte ID No: 700454614H1
  unsure 2-3, 19, 40, 43: a, t, c, g, or other
gnnacctcaccagcttgcnaaatctctaaacctaggtgcngcncacgga

SEQ ID NO: 4212 - DNA, 205 bp, Zea mays
  misc_feature: Incyte ID No: 700454616H1
  unsure 6, 27, 33, 35, 46, 53-54, 66, 74, 76-77, 84-86, 101, 104, 107-108, 120: a, t, c, g, or other
gttccnctgaaccgggacgaggctacnacatangncggcggctganccccgannaacggcggcggngctgcganannggaggtnnnccgcgactaggattncgnatnncaggagctggangcagagaatcagaggctggacaaggattgcttagacctgtacctgaggattcaaggagggcagtgttggatccattactgcacat

SEQ ID NO: 4213 - DNA, 192 bp, Zea mays
  misc_feature: Incyte ID No: 700454617H1
  unsure 25, 51, 64, 71, 91, 103, 133, 137, 140-141, 152, 173, 182: a, t, c, g, or other
gatccgcagttcccccgacgcccgngacgcaaaccccgcgaccaggagtangtttgttcttttntacgatnttatacgatctggcgagggnggagaatgtctnactggaccaagctggctgagcaggccgaanggtntgnngagatggttgngtatatggagaaggtggctangactgtagntgtggaagag

SEQ ID NO: 4214 - DNA, 191 bp, Zea mays
  misc_feature: Incyte ID No: 700454619H1
  unsure 14, 71, 119, 163, 181, 185, 190: a, t, c, g, or other
gcgccgaaccgcangactcagctccggtacgcgtacgttggcgtacatgctacatgtaccgacggccagcngaaaccggggcgagccagccgccaacgtacaagatacggacaagtgcngtgtacaccttacgggttcggcgcggactacgaccccacggtgntgaacgcggtggccaggncccnttggna

SEQ ID NO: 4215 - DNA, 187 bp, Zea mays
  misc_feature: Incyte ID No: 700454620H1
tatcgtagaagtaaagccgcaggagttagacaagggtacgtgctgtacgacaagctgattcaagcactggccaacaacaacgggaaggcacaggatttcctgatgtgcgtcggcaacccagaatactgacgaggacatgttcgaatgcatcaacggtatggacctccaacgatgtcacatagaacca

SEQ ID NO: 4216 - DNA, 180 bp, Zea mays
  misc_feature: Incyte ID No: 700454623H1
  unsure 10, 36, 45, 58, 81, 95, 112, 165, 173, 175: a, t, c, g, or other
ctcgagcaancgtttccgctcttctgctcctcgcgncgccgcagnaaacccgaacgancaggtaatggcttccgacgaggngctccggaagccgnatctcgccgcctcttcncctaccccaccctccgtgctgctgcatctcgggaccgacgtgctaccagatgngcccgtgngngatcg

SEQ ID NO: 4217 - DNA, 181 bp, Zea mays
  misc_feature: Incyte ID No: 700454624H1
  unsure 23, 31, 33, 41, 56-57, 64, 66, 83, 112, 116: a, t, c, g, or other
ggtgaagtgggaaggcgcgcggnggggaggngnggagaggnggatggctgcggcannaggaggncngtggcggtcgcgcgtanacagttcgcctgcaccgaacgtcgaggcnagancgtcgccaccgccgagaggttgattagagaagcacacaagaacggtgcaaagattgtactcgttc

SEQ ID NO: 4218 - DNA, 189 bp, Zea mays
  misc_feature: Incyte ID No: 700454625H1
  unsure 12, 20, 65-66, 86, 90, 118, 129-130, 132, 135, 137-141: a, t, c, g, or other
gacctctaatgntgtctggnaaccaatactccaccagtgttgtcaacaaaatacgagcttaccgnntcggcttacatacttacgtntgcnaacttcacacatccttgcgaaggtttcncagtaccctannantcnannnnnataagaaacgcactggaccccgaccatgccctgtttgctatgtttctg

SEQ ID NO: 4219 - DNA, 186 bp, Zea mays
  misc_feature: Incyte ID No: 700454627H1
  unsure 7, 20, 87, 115, 127, 142, 145: a, t, c, g, or other
gcctacnaatgatgtctggnaaccaatactccaccagtgttgtacaacaaaatcgagcttccaaatcggcttcatcttacgtatgcnaacttcacacatccttgcgaaggtttcncagtccctaccnacccctggttgatanganacgcactggaccccgaccatgccctgtttgctatgtttctg

SEQ ID NO: 4220 - DNA, 191 bp, Zea mays
  misc_feature: Incyte ID No: 700454628H1
  unsure 63, 84, 102-103, 105, 107, 110-111, 113, 129, 160, 178: a, t, c, g, or other
tgagcagcggggagctgtctagctagacctagtacaggtggagtggagtgtgtggtggagtgncaaaccaaatcaaacgaaganaagtgggagcgaggaggnngncnagnngnagaagaagacgacgangacacccaccaccagacagcaagacagacantcagcagaacgaactgtncgatcaagtactg

SEQ ID NO: 4221 - DNA, 192 bp, Zea mays
  misc_feature: Incyte ID No: 700454631H1
  unsure 17, 28, 48, 57, 60-61, 68-69, 84-85, 91, 94, 116, 133, 148-149, 154: a, t, c, g, or other
gggtttagccatggcgnaccgaggaccngactccttgtaaccaagctnccgccccgncanngccatanncgcggaagaagacgnngagggncangtggggccagcctatctccgcngccgccgccgatgaggngccgtcggtggagcnnagccngaggcacccggcggggtagttgaggcggcgtacaggtg

SEQ ID NO: 4222 - DNA, 192 bp, Zea mays
  misc_feature: Incyte ID No: 700454632H1
  unsure 16, 21, 29, 33, 39-40, 48, 63, 70, 81, 98, 101, 109-110, 119, 126, 129,141, 151, 159, 163, 168, 187: a, t, c, g, or other
ctcctgccagttcatnggcanagcagacngagngcgccnngagcttangaacatggagaaccngggggcntgaatactggntactgttacctacgtcnttntacggganntcgttccantttggangancgggacgatgcngttcccgggncttccaantggngcaangtggaagacgaacgggggntggta

SEQ ID NO: 4223 - DNA, 194 bp, Zea mays
  misc_feature: Incyte ID No: 700454633H1
  unsure 85, 92, 143, 157, 176, 180, 185, 190, 193: a, t, c, g, or other
cgaaatcctccaataccccaccctaacgaatcttccaacccctaccgacgatgccttccgcgccggagctacgtaccccgcgtgngacatgncaggagccgttgctggcggagtcgtaccgaccgcttctaccatgttcccgntaccggtcacccgncagctttgggagttctacnaganggcgntggcntcnt

SEQ ID NO: 4224 - DNA, 183 bp, Zea mays
  misc_feature: Incyte ID No: 700454634H1
  unsure 8, 10-11, 39, 42, 44-45, 52, 57, 63: a, t, c, g, or other
ctacgagnanncaggccataacgtataccggagatgaanggngnnggaggcngtgangaaatntccttttttttcttctacatttttcacgaggatgcggtgcactgctcccagaatgctgtgtccaatttacaaacgcacaggtggcacatgaactagacagagtagctttatactgaaagg

SEQ ID NO: 4225 - DNA, 184 bp, Zea mays
  misc_feature: Incyte ID No: 700454637H1
  unsure 56, 74, 86, 88, 90, 98, 111: a, t, c, g, or other
tttcggtctcatctccgtaccacatccgtacctaccagtcaactaccagctgcatngacgaggaccgccgtagnatttgcgaacgngngnacgggagnggaacccgagganggcgaaaatgatctaccgacaactggtcgctgctctcgtccacagtcgtcatttggggcggcgtgcaccgccg

SEQ ID NO: 4226 - DNA, 185 bp, Zea mays
  misc_feature: Incyte ID No: 700454639H1
  unsure 6, 27, 42, 66, 74, 98, 123: a, t, c, g, or other
ttgtgnccctccctacagccgcgtcgntacgcatcctaacgntaccaaagctactatctgctcgcngccatggngaagaactacccgaaccgtgagcnccgagtacagcgaggtgtggcaganggccaggcgcaagtaccgagaccctcatcgccgagaagagctgcgccccgctctgctccgcc

SEQ ID NO: 4227 - DNA, 181 bp, Zea mays
  misc_feature: Incyte ID No: 700454640H1
  unsure 71, 92: a, t, c, g, or other
ggcaccgctgacctacccagggtgtctactactaacttctaaccaaatattccggaacagggccgaggcangggcccttgagcgatccaggngagggcttggcgatgggtctgtcgggatgctccgtctctcactgtcgctgccctgtctggctgtgtcaatgtactgctcaaaacccgat

SEQ ID NO: 4228 - DNA, 188 bp, Zea mays
  misc_feature: Incyte ID No: 700454642H1
  unsure 3, 19, 37, 43-45, 49, 59, 61, 67, 78, 86, 99, 108-109, 121, 124, 167: a, t, c, g, or other
gtncattctttttgcttcntgcatgtgctacataatncccacnnntgtngatacctaancnaagccncactggagagnacatatanccatcagttacanggtgaaaanncattttccattnctntgacatggcataccaagggtttgccagtggtgatccagagagngatgccaaggcatccgaattt

SEQ ID NO: 4229 - DNA, 184 bp, Zea mays
  misc_feature: Incyte ID No: 700454645H1
  unsure 11, 42, 55, 57, 66, 134: a, t, c, g, or other
tcacgccaganaccctcaagtacatgtaccaagtaccagggncgtgagattcacncngtggactgnccacgggaggcgatgaggctgatccacgcggaagacaagaacctcaaggccgaggactcagcgtgggngctgaagaagaagttcggacaaggacgtgagaaccatggtctcgtctaca

SEQ ID NO: 4230 - DNA, 188 bp, Zea mays
  misc_feature: Incyte ID No: 700454647H1
  unsure 6, 36, 51, 54-55, 76, 81, 109, 122, 129: a, t, c, g, or other
gttganggtagatcggaaaggtatgcagttcagaangatgagagcttgtcnganntaaggacgcgactaccttcanattgnaaatcagcaaagcagtttactggatctnctccagaaatttntggggangtccgagaacggtatgcattctttggagacaagagtgacatgggctggagatggctttg

SEQ ID NO: 4231 - DNA, 192 bp, Zea mays
  misc_feature: Incyte ID No: 700454648H1
  unsure 59, 101, 114, 171: a, t, c, g, or other
gtttgtgccttggtgcagtcacctacaactagtttccggctttacttggactgaagatncgaccacttctgcgaatgcccggaacaactttagaggccgancgggtgtcggaanggctttattactgccttccgagctggtgcagtaatgggcttcctgcttgctgccagnggtcttttggttctttacatt

SEQ ID NO: 4232 - DNA, 189 bp, Zea mays
  misc_feature: Incyte ID No: 700454650H1
  unsure 4, 8, 24, 32, 47, 64, 66, 81, 84, 94, 130, 158, 160, 162: a, t, c, g, or other
gtanaganttgcttgagaggatanctttgcgnccatgggctacaaantcccccaaagggttcancngagaaaacccagctnggngattgctggntacagacgagctgcttgattgtgccactgaggtggnccgatccaagagtctattacctgaaagncnangcatctgaaatcgaaatttcagatgct

SEQ ID NO: 4233 - DNA, 187 bp, Zea mays
  misc_feature: Incyte ID No: 700454651H1
  unsure 7, 23, 49, 77, 112: a, t, c, g, or other
ctcgacntcgtgatcccgaacgntccgcaacctacgaacttcctcgagntgtggaggcccttcttccagccctaccncctcatacatcgtgcaggacggcgaacccgaccangaaccatacaaggtgcccgagggcttacgactacgagctctaacaaccgcaacgagctacaaccgctcctcgggc

SEQ ID NO: 4234 - DNA, 190 bp, Zea mays
  misc_feature: Incyte ID No: 700454652H1
  unsure 34, 52, 74, 97, 132, 137, 166-167, 170: a, t, c, g, or other
caagcttgctaactgtgatttctcgtccgagcancggcgaaggagagagcgngagcatggccgaaccacaaggnggagcctgtgccggagtctgtgntggacaagatcaccgagaagttccacggccggggnctacntacgtacgtacgtacgtactgactacggnnganagtaagaaggggtcctacgt

SEQ ID NO: 4235 - DNA, 185 bp, Zea mays
  misc_feature: Incyte ID No: 700454653H1
  unsure 2, 14, 25, 53, 72, 172: a, t, c, g, or other
gntcacgaccaganaccctcaagtncatgtaccaagtcaccagggacgtgagntccacgcaggtggaactgnacacgggaggcgatgaggctgatccacgcggaagcacaagaacctcaaggccgaggactcagacgtgggagctgaagaagaagttcggaaaggcgtgagnccatggtcctcgt

SEQ ID NO: 4236 - DNA, 179 bp, Zea mays
  misc_feature: Incyte ID No: 700454654H1
  unsure 61, 64: a, t, c, g, or other
catgtacaacctttagcaattgacctagtggaaaagatgctaacttttgatcctagacagngantaactgttgaaggcgcacttgcacacccttacttggcatacacttcatgaacataagtgatgagccagtactgctacaatgcccttcagcttcgacttcgagcagcagcattatc

SEQ ID NO: 4237 - DNA, 180 bp, Zea mays
  misc_feature: Incyte ID No: 700454657H1
  unsure 34-35, 43, 66, 82, 162, 170: a, t, c, g, or other
caaatttcttcaaccaagattcctgcccgtctcnngagtggcngcgcaatatgctacggcctgtgnaaacttcacgagcgancgtacaacttatctcggcaaggaacagacacaggacaggatcatggagttccttcatgatgcttgctcccaatcattctncctttgancgaagtgtgt

SEQ ID NO: 4238 - DNA, 182 bp, Zea mays
  misc_feature: Incyte ID No: 700454659H1
  unsure 15-16, 19, 47, 60, 67-68, 73, 76, 106, 109, 176, 180: a, t, c, g, or other
gcggacggcggcggnnaanacgcaggcgcaggcgccggtgtgagggnaggtgcaccagancatagtnnctgancancttctaccgcaactatggtaagagcgttcngcnaccaaggcgtaccttatgagaaggagcgtcttgatgctgaactgaagctggttggtgcgtatgggtnaggngc

SEQ ID NO: 4239 - DNA, 189 bp, Zea mays
  misc_feature: Incyte ID No: 700454660H1
  unsure 13, 30, 33, 41-42, 49-50, 56, 67, 70, 83-84, 87, 98, 122, 134, 140,168-169, 188: a, t, c, g, or other
ccaccaaccgtcncacgtcactgggttcangangttccccnnaagtacnncgacancttccaggganacnatccgtgagcaanntcncgtcgttcatngaaaccagagggctgcccaagggnctggtgctcggnagctgnaccgtacctcgaggccgccgggcagggnngacttggcccatgtaccanc

SEQ ID NO: 4240 - DNA, 195 bp, Zea mays
  misc_feature: Incyte ID No: 700454665H1
  unsure 43, 75, 138: a, t, c, g, or other
catattgtagggggctcatggcttgtgatgagaccaggtttgntgcaattatagcgaataagataccctacttgntacttagtgttggagaccttggatatggtaaaactttggagatcgagataacaattacctacntgactttacgccagaaccgaaatattacatgttacatacatgcagcaggtttacatt

SEQ ID NO: 4241 - DNA, 203 bp, Zea mays
  misc_feature: Incyte ID No: 700454668H1
  unsure 4: a, t, c, g, or other
ggcnggataaccgaacctgactgattctggaagacgaacggaaccacatcggacgggcggatgcacaagaacgaacttagaccggacatacaaacgtacgagttaggacgaccaaactgggtggagggacgtgaaccggaggacaagatgaaaccccatatggacccatagtacaaataccaaccctacaagactaccgacaa

SEQ ID NO: 4242 - DNA, 181 bp, Zea mays
  misc_feature: Incyte ID No: 700454671H1
  unsure 12, 39, 72, 78: a, t, c, g, or other
ccataaacaagnaaaagaaaagaaaacccctgttgaccngcgcacgaagaagaaggggccccttataccttngttgcnttgcgcctaccctacctgtactgcgtgcgtgcaatcgacgcgaggcgcgggcgtcgcaccaccacaaccacgacccgatggctttcatgcgctcccgctcaaa

SEQ ID NO: 4243 - DNA, 143 bp, Zea mays
  misc_feature: Incyte ID No: 700454674H1
  unsure 5, 14, 17, 91-92, 121, 135: a, t, c, g, or other
ctacnagcaatacnacntacgggatcccgccgaccgctaccatctgcctttgctacccccacccgacagacagcgagcgacagccaggcgnngggatggccaaggccggtcgttggcgaanagaagcaggcgcanaatacaaa

SEQ ID NO: 4244 - DNA, 179 bp, Zea mays
  misc_feature: Incyte ID No: 700454675H1
  unsure 71, 120, 132, 137, 177: a, t, c, g, or other
cgctcctctcacaacccagtacgctcaaaaccctagagctctcgcctgctcgcttccgccgccggagcganctaccccatcttcatccgtcaaccatggcgacccagatcagcaagaagnagaagttcgtangcgangtgttttctacgccgagctcaatgagatgctgacgcgggngt

SEQ ID NO: 4245 - DNA, 198 bp, Zea mays
  misc_feature: Incyte ID No: 700454676H1
  unsure 8, 25, 27-28, 37, 70, 88, 96, 139, 188: a, t, c, g, or other
gacgagcnagggacccggggcggangnngagagcgangacgtctactatacctactacggagtaccccgntaccccaaacctactacntactgctnacctgacctgacctgacctgacctgacaaaaaggagtttgtantggcgtctacgcgcatacctcaaggagctgaaggacctgcagaaggacncccccacatc

SEQ ID NO: 4246 - DNA, 184 bp, Zea mays
  misc_feature: Incyte ID No: 700454677H1
  unsure 19, 29, 37, 65, 86-87, 113: a, t, c, g, or other
cgcacccccggcagccgcncacgacccantaccccgncggacccttacggcaggtcttacttcgnccccttcgccggcgacgagcnnaaccaggcgtacatgtgtacacccangcccttaactgagcccgcccctgagactggttttcctgctggtttgtgtggatttggctgcggagcattgg

SEQ ID NO: 4247 - DNA, 180 bp, Zea mays
  misc_feature: Incyte ID No: 700454678H1
  unsure 2, 79, 155: a, t, c, g, or other
gnttagttgatttcttgaagggactaccttgaatttgatccaaataagcgatggtcaccattgcaggctctacaccatnccattcataagcggagaatcgtttactggtcctatgagccaatacccgagactgcaagaattcctgttgctcgtgncagcgcaattgatcacatcctggag

SEQ ID NO: 4248 - DNA, 181 bp, Zea mays
  misc_feature: Incyte ID No: 700454679H1
  unsure 48, 54, 60, 62: a, t, c, g, or other
cgcagattatgtttgaaaccttcgaatgcccagcaatgtatgttgctntaccangctgtncnttcgttgtacgctatgggcgaacaactggtattgtgatggattccggtgatggtgtgagccacacggttaccaatctatgaaggatacacacttcctcatgctattctccgttggatct

SEQ ID NO: 4249 - DNA, 183 bp, Zea mays
  misc_feature: Incyte ID No: 700454682H1
  unsure 11, 19, 24, 28, 52, 64, 78, 87, 131: a, t, c, g, or other
gcctctaatgntgtctggnaaccnatantaccaccagtgttgtccaacaaantcgaggctttcnaaatacggcttcanacttacgtntgcaaacttacacacataccttgcgaaggtttctcagtaccctnctcccctggttgataagaaacgcactggaccccgaccatgcccgtttgctat

SEQ ID NO: 4250 - DNA, 180 bp, Zea mays
  misc_feature: Incyte ID No: 700454683H1
  unsure 19, 50, 53, 56, 74, 140: a, t, c, g, or other
ggttggactatgtttggtntgtggtgcatctgatactacaagagctcccnacnaantttacattaagcttgcanaggatgcctacaacacctgatttgatggcggcatctgactgcatgcttgggaaaatcggatatggncactgtgagtgaggctttggcttacaatacgccatttgta

SEQ ID NO: 4251 - DNA, 182 bp, Zea mays
  misc_feature: Incyte ID No: 700454684H1
  unsure 2, 37, 43, 54, 76, 114: a, t, c, g, or other
cncaaccatacaccccccaacgaaaaaagcgaaccgngggcgnggaaggctcgncgcgttaccggcccggagatgnggggcggatccagaccggccccggtcgtacctgtttcncctcgctgcgtccgggatctgcgcccaattcaccgcagtgctagctggtgatccacaaacatccaacg

SEQ ID NO: 4252 - DNA, 179 bp, Zea mays
  misc_feature: Incyte ID No: 700454685H1
  unsure 4, 7, 9, 25, 62, 67, 78, 83, 88, 107, 151-152, 158, 161, 168, 171, 176: a, t, c, g, or other
gcanacntnactagttgtcctgatnttatagctttacgtggtgtgtttacgtacactgtatntgcangggtggggagngcgantgctntgcctgtattactgtcaantgtttttttatactgtacaagagctactgcacttttaattacgnngcaaanggnttatatntancgaancac

SEQ ID NO: 4253 - DNA, 177 bp, Zea mays
  misc_feature: Incyte ID No: 700454687H1
  unsure 6, 19, 26, 130, 167, 170: a, t, c, g, or other
gagcgnttgcgacggcggnagtaagnggcgatggggcactacccacgtgtggaatacgcaccccaagaactaacgggacccggatcccgcgtctgccgggtctgtgcgaaccctcatggactgatcaggnagtacgggctgatgtgctgacaggcgtgcttccgcgnaangccaagg

SEQ ID NO: 4254 - DNA, 178 bp, Zea mays
  misc_feature: Incyte ID No: 700454688H1
  unsure 3, 5, 40, 86, 111: a, t, c, g, or other
ggngntctttcaaggctcagggatggctcccttgatatangggccagttctggagatcctttacaaggctactctagtaatgctgnggcacttagttctacaggctttcangatatgagaaatcaggctaacaaacaagagtttcttggtgatactccctgttaccaaactggagtgc

SEQ ID NO: 4255 - DNA, 244 bp, Zea mays
  misc_feature: Incyte ID No: 700454690H1
  unsure 23, 26, 40, 50, 53, 62, 67, 69, 82, 88, 91, 94, 110-111, 121, 198, 243: a, t, c, g, or other
agacccacacaagactttacaanggncagatagacgacgnaacagcgagnaancggaaaggncagtncnccccggaatacgnaacatnctnacncaacgggacccccagnncggtactacncaaacaccgagacgatgacagacggactaccaacagggcactaacaaccgtggaccaacgaccaccactacgtacgnacaacgtgtacacacgtacgacgactgagcttacgacgcgaaggng

SEQ ID NO: 4256 - DNA, 169 bp, Zea mays
  misc_feature: Incyte ID No: 700454692H1
  unsure 9, 45, 140: a, t, c, g, or other
gttcaccantacagagctctggagatccaggtcctagaactgctnacccttccggcctaatttatcctccatagcaccgattggttctgatgatctctaccctgggcctggtgcggttctaccctcacagtggcttgggngcggtggcgctgctgttggtctaatgatc

SEQ ID NO: 4257 - DNA, 189 bp, Zea mays
  misc_feature: Incyte ID No: 700454694H1
  unsure 23, 31, 36, 51-52, 59-60, 67, 73, 92, 115, 148, 150, 181: a, t, c, g, or other
ggcgccggcgtgcttgtgatctnaacccaantacgngcctccgctaccggnncacccgnncggtacnacgacnaaccatgtacgaggaggangaccagggagcccaaggaggagnacgtacacccttggacccactgtccgtgaaggngngtatgtctttggtgttgctcacatctttgcntccttcaa

SEQ ID NO: 4258 - DNA, 189 bp, Zea mays
  misc_feature: Incyte ID No: 700454695H1
  unsure 24, 63, 65, 78, 87, 94, 118: a, t, c, g, or other
gtgaccctccctcagccgcgtcgntacgcatacctaacgataccaaagctactctctgctacncngccttggcgaagnactacccgnccgtgancgccgagtacagcgaggctgtggngaaggccaggcgcaagtaccgagccctacatacgccgagaagagctgcgccccgctcatgctccgcctcgg

SEQ ID NO: 4259 - DNA, 321 bp, Zea mays
  misc_feature: Incyte ID No: 700454701H1
  unsure 6, 50-51, 81, 130-131, 137, 139, 145, 149, 151, 156, 164, 170, 172, 185,189, 191, 196, 200, 205, 216, 242, 247, 259, 280, 287, 301, 308: a, t, c, g, or other
gttgantggtattttggttccaaaattgagctcaaggacaataagggcanngcggttggggttgttggcagtggtaatcantggccccacaatggtggttcttcattcagcacctagtaccagtccaagnnaaaatngnatcagnattnanggatnatcaagtncggtgnangcgttgtagttanctantncattngganccgancaatcagcatngagctggtctcctgcatggaagaaanccccnttggtgacaaanagttgtggcaaaagggatttnatgggangccaggggagccgngaaatangggtccttgaaaa

SEQ ID NO: 4260 - DNA, 291 bp, Zea mays
  misc_feature: Incyte ID No: 700454703H1
  unsure 58, 249, 252, 275-276: a, t, c, g, or other
cttagccaaactcagatctttgccaaaattgagaatgttgagggcttgaaccattttnatgaaatactgggcagaggcagatggtatcattctgtcaagaggaaaccttggaattgaccttccacctgagaaggtctttttgtttcaaaagtctgcgcttcacaagtgcaacatggctggaaagcctgctgttgttatcgtgtcgtggacagccagactgacaacctcagacctactcgtggcagaggnaangatgtggcaaatgcagttcttgnnggggagtgacgcctt

SEQ ID NO: 4261 - DNA, 295 bp, Zea mays
  misc_feature: Incyte ID No: 700454705H1
  unsure 55, 190, 195, 214, 274, 281: a, t, c, g, or other
gcacttagctgctaaaggaacaaatattcagagttctgcttgtggttaccaaganccattgtacgatgtagaggaacttcgctccattgcaccagctgatgtgaaacagtccttcgacattcgttcaataatagcccgtattgttgatggaagtgaatttgatgagttcaaaaaattgtatggagcaacnactantgaactggttttccaaggntatgtgggcaaccaagttggaattatgggaaacaatggcattgggtttaccagattcaancgtgganagggcccccacttc

SEQ ID NO: 4262 - DNA, 294 bp, Zea mays
  misc_feature: Incyte ID No: 700454706H1
  unsure 113, 165, 169, 172, 177, 245, 255, 259, 262, 265, 279, 288: a, t, c, g, or other
catcagcatagacaagatcagggccatgaacaagtacagcaagggcagtaggaggcagccgcagcttcttcctactctctcactctacttctacctggccgtcgccacctttntcctctgcctgttgctcactagccctgcctggttccccgggctgtgctcggncctngcntcctncttcctcaccaccctccctggcttgttcacggcctttcctgctcagccccaggtgcctcttcgtcgtncggcaacctnaatnatngcncttgctcgtcgggnagttctagntggcac

SEQ ID NO: 4263 - DNA, 292 bp, Zea mays
  misc_feature: Incyte ID No: 700454707H1
  unsure 93, 162, 181, 183, 254, 284: a, t, c, g, or other
gcattttctcaataccttgaacaactaagcaagtccaatgtctcatgcccagccccttcgtttacaggcccagtggaaacacgtcgatattcnggataaccaagccaatgctatgaaggaaccaggaaccagtggtgggtatggctccccaatgaaagatgncaagaacaaggatgtggananaatagcttcgaacttcatcaagcttaagcacagggcttgggcacttccagaagagcacaaccatgtaccanccttccacttaaaggtgttgctagttcaanaagtcaat

SEQ ID NO: 4264 - DNA, 284 bp, Zea mays
  misc_feature: Incyte ID No: 700454708H1
  unsure 19, 107, 118, 205, 244, 272, 279: a, t, c, g, or other
gttggaagaaggctcttgngatagccacggatgctgactacaagtttgacctagctgtgcagcttggaaaattagatgttgcaaaggctatcgtcatagaagcacanagtgaatctanatggaagcagttgggtgaactcgccatgtccacaggcaagctagagatggcggaggaatgccttcttcaagcgaaggatttaagtgnccttgttgctgtggtactccatctcttggagatcctganggaattgaaaaagcttgcttccttgggnaaaggancatgg

SEQ ID NO: 4265 - DNA, 296 bp, Zea mays
  misc_feature: Incyte ID No: 700454710H1
  unsure 15, 22, 72, 83, 98, 132, 137, 150, 158, 175, 214, 221, 229, 235,238-239, 256, 258, 262, 274, 283, 285, 289, 294: a, t, c, g, or other
cccttccctccctcnctctccncgacgggccgccagaggcaatttcgccctcgattcgaccccgattcgtcngcccgcgatcngggattccctccgcnaagcgcggctctgaacgctgcgctccgtgtcgcngctcnaatccgccatganatggggcnaattccaagggcgccgnccaaggccgatgtccaagctggcggtgaagagcaagggngcggaanagccctcnaaaggnaannaaaaggggaaggccggnanaggnccccaacaagcntaatagggncncagngtttntt

SEQ ID NO: 4266 - DNA, 286 bp, Zea mays
  misc_feature: Incyte ID No: 700454717H1
  unsure 251: a, t, c, g, or other
gggatccatggggtgttcccgatgactacgaatgtgaggtgattgaagacgacaccccaattcctaagcatgttcctcagcaccggcctgttgctcttcatgaggagttcttcaaggcactagatgctgtcaaatctgatcctgctcttcaaggcgatgctcctcctcaagtgaaggcgtaaggatggctgttcctggctaacgtcatttcacattttgccgcggtgggtaagggactggtttctgtggcnattgccagcaatgcgcttgctctgagcagaataaa

SEQ ID NO: 4267 - DNA, 285 bp, Zea mays
  misc_feature: Incyte ID No: 700454718H1
  unsure 102, 112, 143, 194, 278: a, t, c, g, or other
gatcttgaagggcacgctagctgttggttttgatgctgatgccaatggtgatgtcactgcagttaagctaaaggatggcacagtacttgaagccgatattgntgttgtcgangttggaggcagaccattgactactctcttcnagggtcaagttgctgaggagaagggtggaatcaagactgacgcttcctttnaaaaaagcgttcctggagtatatgccattggtgatgtggctaccttccctttgaagatgtacaatgagttgaaggagatggacntgttgac

SEQ ID NO: 4268 - DNA, 292 bp, Zea mays
  misc_feature: Incyte ID No: 700454720H1
  unsure 238, 271-273, 278, 281, 290: a, t, c, g, or other
aacccgtcagcccctctcgtttttcatccgccttcgcctccaaccgcgtgcgctccacgcctcctccaggaaagcgagagcttctgcataagaacaacaaatcaaaagcgtgatcagctcggtgccaacaaaacctcaacaaccaagtttcatgtctgatctcgacgtccagcttccatctgcctttgatccgtttgctgaggcaaatgctgagggactctggtgctggtcctgggancgaaggatttatgtggcatgtgcgcatccagcnnngcaanggnaagaaaaantt

SEQ ID NO: 4269 - DNA, 287 bp, Zea mays
  misc_feature: Incyte ID No: 700454721H1
  unsure 45, 184, 191, 248, 264, 267, 271: a, t, c, g, or other
ggagagtgtacaggggagtgctcccgaaatccaagcgggaggttnccgtcaagaaggtgtctcacgaatcgaggcagggcataaaggagttcgtcgctgaggtggtcagcatcggccgtctccgacaccggaacatcgtccagttgctcggctactgccggcggaaaggcgagcttctcctggngtacgantacatgcccaacggcagccttgacaagtacctctacggcaaggacgacaaggccacngcgacgtggattgggngcnaagnttccggatcagcaaag

SEQ ID NO: 4270 - DNA, 288 bp, Zea mays
  misc_feature: Incyte ID No: 700454723H1
  unsure 64, 66-67, 157: a, t, c, g, or other
ctcaacctcgccgacctcgtctggctctcaggggctcacacgatcggcatctcccaatgcaacncnntcagcgagcgcctgtacaacttcacggggcgcggcgggcccgacgacgcggacccgtcgctggacccgctgtacgccgcgaagttgcggntcaagtgcaagacgctgaacggacaacacgacgattcgtggagatggaccccggcagcttccgcaccttcgaacctgagctactaccgcggcgtggctcaagcggcggggcctgttccagtccgacgccgc

SEQ ID NO: 4271 - DNA, 285 bp, Zea mays
  misc_feature: Incyte ID No: 700454724H1
  unsure 27, 139, 225-226, 233, 235, 258, 282: a, t, c, g, or other
aacgccgccagcggcttctccgcgaanttcaccccccagcaggtcaaggatctcaaggagcaaccaggtgttctccaggttgtgccgagccagacttaccagctacatggtcctgggtctggcactcaccagggcacgncacacaccttgggccttatgtgaaggcgtatgagaatcaagaagactgggtttagtatggctgtatggcacaggtctgacgaatgnntatagtncngtactatgtaagaaataagggantatcgtctaaatactgctttgtcncat

SEQ ID NO: 4272 - DNA, 138 bp, Zea mays
  misc_feature: Incyte ID No: 700454725H1
  unsure 60, 128: a, t, c, g, or other
gggatccatggggtgttcccgatgactacgaatgtgaggtgattgaagacgacaccccanttcctaagcatgttcctcagcaccggcctgttgctcttcctgaggagttcttcaaggcactagatgcngtcaaatctg

SEQ ID NO: 4273 - DNA, 277 bp, Zea mays
  misc_feature: Incyte ID No: 700454726H1
  unsure 30, 195, 259, 266: a, t, c, g, or other
gggtgatgaaggccttcgtgctgtggctgntgcatgctctgatctccgtgagctgagagtttttcctttggatgcctctgaagattccgagggttcggtctcagacgttggtcttcaggcaatctcagaaggctgccggaagctggaatcaatcctctacttttgccagaggatgacaaatgcagcagtaattgntatgtcgaagaactgtcctgagctcgtagtgttccgcctctgcattatgggccgccaccgaccncgatcgngacatggggag

SEQ ID NO: 4274 - DNA, 96 bp, Zea mays
  misc_feature: Incyte ID No: 700454727H1
  unsure 2, 18, 30, 33, 41, 43, 48, 69-70, 80, 84: a, t, c, g, or other
anagatcgtgtgccactncaacaagcaggnttngcagagcnanaaganattcatgagtagtgcaccacnnaagcgcagtntgcntcgccaaggtgc

SEQ ID NO: 4275 - DNA, 299 bp, Zea mays
  misc_feature: Incyte ID No: 700454729H1
  unsure 32, 75, 77, 80, 90, 157, 172, 190, 199, 222, 229, 232, 243-244, 253,255, 260, 277, 294: a, t, c, g, or other
agtcatcttgtacaggatgttgcaagggtganaggctacaacattggttttggaacctgcaccgggaaggttctncnggnacttccctgnaccaacacgtcttggcatcagttctccggagtctcaacgatctcagctatcagagagtggtctcagnggtctcaactatcanagagttcatgccgctatntagcaaggntgctatgtaactggacaatatgnatatggnttnttttcctgggnntgtgtgaanangaggnggactggaggctctgtnaagcaataaaaccgctncacct

SEQ ID NO: 4276 - DNA, 295 bp, Zea mays
  misc_feature: Incyte ID No: 700454730H1
  unsure 160, 219, 272, 278, 287, 291: a, t, c, g, or other
gtggccggatctttatttggagaaagggagatgggaagtttctacgagccatggagggtgatgagtgcattgtgaattgcattgagcctcatcctcatgctatggcaatcgcgagctgtggaattgataatgatgtaaaagtttggactccctgctgcgnttgagcgggcacctatgatacatgttgatgaggctccagttgagactcgcaagagaagngccaagctctggcgctttggcatacgagacctgttgatccaacagatactggnatcggnaaataggcnaacngtca

SEQ ID NO: 4277 - DNA, 283 bp, Zea mays
  misc_feature: Incyte ID No: 700454733H1
  unsure 4, 15-16, 22, 26, 33, 52, 84, 90, 98, 128, 132, 153, 185, 187, 214, 235,244, 248, 276-277, 279-280: a, t, c, g, or other
gtgntcagcagcttnntgtgantcgnagatgancgtggtggggttcgacctnggcaatgagagctgtatcgtggcggttgcgcngcagcntggcatcnacgtggttctcaacgaggagtccaagcgcnaganacccgcacatcgtttgcttcngggacaagcagcggtgcatcgggaccgccggngnccgcgtcctcaccatgaaccccagaanctccatctctcaaattaaggnctgctcggncgcnagttctcagattcggagctgcaacgcgnncnngcc

SEQ ID NO: 4278 - DNA, 283 bp, Zea mays
  misc_feature: Incyte ID No: 700454734H1
  unsure 32-35, 38, 49, 68, 70, 97, 134, 142, 144, 149, 151, 159, 168, 170, 190,232, 240, 252-253, 262, 265, 271: a, t, c, g, or other
ggcaactcaggagagagcgcggctcctacccnnnngcngtgaagccgcnacgatccaacggagcagangngccatggctgctcccgaagcgcccgcntgctacgtcggggtcgcgcggcagtccgccgccttcngccttatnangcaantnggatgggnagaaggtgnanggccttggcaaagacaagcnaggcataaagggtcatgttagggtgaacaacaagcaggacanactaggtnttggtgtacatnncctcataanaantgggtntacgtaccaccc

SEQ ID NO: 4279 - DNA, 138 bp, Zea mays
  misc_feature: Incyte ID No: 700454739H1
  unsure 29, 31, 65-66, 81, 88, 105, 130: a, t, c, g, or other
gatagtgtcactctcaccgactttgaaananagtggggaagcaatggttgaccagtatagtctcnnagacaacaagtggtnctctgcnttgtacagactgtcggnggcaatgggcacctgggtatgtgantcattcat

SEQ ID NO: 4280 - DNA, 283 bp, Zea mays
  misc_feature: Incyte ID No: 700454740H1
  unsure 62, 78, 102, 125, 130, 142, 171, 178, 211, 229, 241, 261, 276, 282: a, t, c, g, or other
gatcttccggcggccggcgagatgagccgtggcacaggcgcgggctatgacagccacatcancatcttctccccgganggccgcctgtaccaagtcgagtangcgttcaaggcggtgaattcggngggtntcacgttcgatnggcgtcccgcggcgcgactccgtctgcgntgttacncagaagaaagtcccggataagttgctggatcgnacgagcgtgacacacctnttcccgatcacnaagtaagtcggttgcttgcnattggccttacaatnatgctng

SEQ ID NO: 4281 - DNA, 285 bp, Zea mays
  misc_feature: Incyte ID No: 700454742H1
  unsure 142, 165, 227, 275, 281: a, t, c, g, or other
gagcttgcaaacgtaggtgaggaaggtgctcaacagaacaaaggagaccaagatcactggtgccaatgcttccctgaaatcacatgcccctcttgtgcacctgtccgcgcttccagaaggcaccgttgtggactcgagatanctcgccttggacgttggacctcnactcggaatctacttccagctcttggcatgtttgtggccatcatgtactgattttccctttncaacagttgtcgtgaggctgtatcttctggagttaaaaaaaatgctanaaagcnggcc

SEQ ID NO: 4282 - DNA, 139 bp, Zea mays
  misc_feature: Incyte ID No: 700454746H1
  unsure 13, 85, 90, 93, 107, 113, 120, 122: a, t, c, g, or other
gaaactcctaganaaatataaaaaggagggaaaaagaaaaacacttgcagcggcatccatcatcggtctatccctccgtgtcaanccctnctnaagaagttctattncagttnagccctngnccggtccgacgggcaac

SEQ ID NO: 4283 - DNA, 300 bp, Zea mays
  misc_feature: Incyte ID No: 700454748H1
  unsure 217, 220, 224, 230, 233, 247-248, 254, 260, 266, 271, 275, 286-287, 293,296: a, t, c, g, or other
aaccctgaaaccttcgtggattctgatgacttgctgttatccagctattcctctagatgggcgttttatacgaagatgcaaacaaggttgcttgcagtttgtgattctcaagcctattttggttgttatcactttcatactttacgcgaaaggaaaatacaaagatggcaacttcagtgtcaaccaatccatctctacataactatcagatatacantcncatnctcaangcnttgtaagcccttgnnatggtncgaggnggcttncaganatcnattcggccaannaatccntgnccca

SEQ ID NO: 4284 - DNA, 134 bp, Zea mays
  misc_feature: Incyte ID No: 700454749H1
  unsure 22, 50, 62, 64, 96, 108, 110, 113, 116: a, t, c, g, or other
atcgcgagttattctacaagtngattggttgtgtgctaaatattatacangtccagttgtgnanagctatacctaaaaaaatttgtcctccgccantccttgtaactngnttnatngtcagacctataacaaaa

SEQ ID NO: 4285 - DNA, 280 bp, Zea mays
  misc_feature: Incyte ID No: 700454750H1
  unsure 102, 159, 218, 252: a, t, c, g, or other
cggaaatgttcagagttccttgtgtttgttcactaaccaccccctctcctgtcatttttctttgaaaattggcattataatcttgattacccttcattgganatgctgcttaccggatctgtaagggcaagaagtagatttgaggcgttgactggactnatgcccatagtaccgggtgaagattgtcaggatatatctacctaaatcgctcttctatnggtttatacacatttctgtccgctgcaattcttnaatgtttgaaattggggctggttgtttt

SEQ ID NO: 4286 - DNA, 283 bp, Zea mays
  misc_feature: Incyte ID No: 700454752H1
  unsure 45, 86, 119, 161, 164, 186, 199, 205, 227, 229, 250: a, t, c, g, or other
ggaccaatctctgtctggtgaagatatttatgagcctttcttaangttgttatggaaaggcaactggtttgtacaagaaaaaagtngtaagatattgactgctataatcagtgcacgancaaagcttcggaatggcacacttccaaatggagatgcttcgnatncgaagagcaagcttacttcaanacatgatgtattnagaggnttggtcaattggctcctgttcnanagctgaggaatcctacacacncgagctgctgctatgccgacttcgatccatgct

SEQ ID NO: 4287 - DNA, 286 bp, Zea mays
  misc_feature: Incyte ID No: 700454755H1
  unsure 26, 87, 93-94, 113, 152, 160, 174, 180, 184, 198, 239, 241, 280: a, t, c, g, or other
aacaagatgggatgcaaccactccanaatactccaaggcacgttatgatgagattgtgaaggaagtctcatgcctacctcaagaaanttgggnncaaccctgataagattgcnttcgttcccatttcctggttttgagggcgacaacatgantgaaaggnccaccaaccttgancgggtngcanaggcccaaccctgnttaaggctcttgaccagatcaaacgagcccaagaggccttngngacaagcccttgagtctgcccctcgaggatgtgtagaanttggtg

SEQ ID NO: 4288 - DNA, 134 bp, Zea mays
  misc_feature: Incyte ID No: 700454761H1
  unsure 14, 25, 27, 66: a, t, c, g, or other
aaggactcgagatngacaccgtcancntccccgtggtggccgttgcgaatgggatcggggaggtgnagcgcaaggtgcagaagagctactgggaggagcactccaagtgcctcactgtcgagtccatgatgctc

SEQ ID NO: 4289 - DNA, 150 bp, Zea mays
  misc_feature: Incyte ID No: 700454763H1
  unsure 3, 11, 33, 47-48, 62, 72, 74, 82, 98, 106, 120, 125, 136, 141: a, t, c, g, or other
cantttcgtgntcagaagactccatcctgctgngtatctctctcatnnggttgataataganacaatttgtnanctgcccantcatgctcatgtggcngccagaancccaagtgtgtcanactgngtgaatgaggnttcanctaatctac

SEQ ID NO: 4290 - DNA, 279 bp, Zea mays
  misc_feature: Incyte ID No: 700454767H1
  unsure 52, 62, 109, 130, 189: a, t, c, g, or other
gcaaattgcgcgcaaagcagaaacgtgctgaagaggaggctttgcgggaganacaagaaganaagaggcgtgcggagaacccagagttataccttgaagagcttcgggnccgatattcagaactttctgntaaatttgagcagaggaagcgacagaaagttaatggtagtcagacaaatgggaaccatngttcatctgcaggtgtaggccgtggcgaaaggactaaatgcagctcagaaggaaaggatgcggctgcttgcctcagctgcttttgatcgg

SEQ ID NO: 4291 - DNA, 129 bp, Zea mays
  misc_feature: Incyte ID No: 700454770H1
  unsure 63, 82, 85, 88-89, 100, 102, 113, 118, 125: a, t, c, g, or other
cccgattaacatcccattggttcccctgtgtgcaagtcatctagctacatttattaacatganactttcaacaccaacgtanggntgnngggcaggaacnangcactcccggnttggngcccgancaag

SEQ ID NO: 4292 - DNA, 276 bp, Zea mays
  misc_feature: Incyte ID No: 700454771H1
  unsure 43, 68, 102, 111, 122, 152, 164, 168, 193, 212, 240, 245, 251, 262: a, t, c, g, or other
aagagacaatcaaccagcaacactcttctcgtataacataatncagcgaaggtaactcacatggcaanttccatgggttgtctcgtcttgctctgccttgtntcttctctncttcccagtgncgtccttggccacccatggggtagcttgtncccacagttctntgancattcgtgccccaaggcgaaggagnttgtgcagtccaatgtggnacaggctgtggccaaggagaccaggatngcggnatcttnggtcagactgnatgtccatgactgc

SEQ ID NO: 4293 - DNA, 281 bp, Zea mays
  misc_feature: Incyte ID No: 700454772H1
  unsure 83, 104, 138-139, 148, 153, 162, 167, 197, 200-201, 210-212, 217, 231,240, 266, 272, 275: a, t, c, g, or other
gggcagtggttgttggaggaggttatatcggcctcgaactgagtgcagccctgaagatcaatgactttgatgtcactatggtngttcctgaaccttggtgcatnccctcgcctcttcactggcggatattgctgcttnnctatgaggncttangatactaancaagngtgtaaagatcttgagagggccgccaagcngtnnttttgatcnnnagccnaatggtggatgtcnctgacagtnaagctaaagatggcacagacttgaanccgatnttnttgttg

SEQ ID NO: 4294 - DNA, 282 bp, Zea mays
  misc_feature: Incyte ID No: 700454777H1
  unsure 21, 76: a, t, c, g, or other
caccaatgatgtgtacaagancgccgaggcggttgatctggcgaccaaagaactaggtggcaagattttgcggcanccagggcctctacctgggatcaacactaagatcgcctcttttgttgatccagatggctggaaagtggttctggttgacaacaccgacttcctcaaggaactccactgaaggctcgggatacccaggtgctgtgctaggatgtagtaatgcttgtctgtggtgtaataagatgtgggtggtttgtttctgccctgatgaacttataa

SEQ ID NO: 4295 - DNA, 296 bp, Zea mays
  misc_feature: Incyte ID No: 700454778H1
  unsure 2, 4, 51, 73, 89, 101, 121, 185, 224, 234, 255, 276, 282: a, t, c, g, or other
gnanccgcatcgaactctacctgcctttctctcgtccctggcggcggcggnatgatggcggcttctactggcnaggacggtgaaggatntgaacccccacnagtttgtcaatgcctactcngcccatgtcaaacgctccggcaagatggagcttcctgagtgggttgacattgtgaagactggcnaggttcaaggagctccctcccttatgcaccctggactgntactacattnaggggctggcatctgtaggcnaggaagatctaactggagaanaaagcnttgggtgttggtgg

SEQ ID NO: 4296 - DNA, 143 bp, Zea mays
  misc_feature: Incyte ID No: 700454779H1
  unsure 30, 32, 37, 52, 102: a, t, c, g, or other
ggcaccggaggcggacaccctctacgttgngnaagtngacgtaggttaggcngaccccggaccatctggaagcggccttcgtcaacttccgcaccatctaangaactccaggacagaaacgtcattgttcttgctaacctcaa

SEQ ID NO: 4297 - DNA, 279 bp, Zea mays
  misc_feature: Incyte ID No: 700454781H1
  unsure 21, 100, 208, 219, 229, 251, 257, 265: a, t, c, g, or other
cggcaatagcgccacactggncgctttcctggtgcagcacgacatggagaacatctacatgtgggtgtttaaggagcgtccggagaatgccctggggaanatgcagctgaggagcttcatgaatgggcactcacgccttggggagccacagttccctttcagcgcagcacaaagggtttgtgcgctcacaaccggatgcagcgcaagnactaccgtggncctctctaancccgcagtgtcttccatgggancgaaancgtgaggncgccaatttggcgg

SEQ ID NO: 4298 - DNA, 274 bp, Zea mays
  misc_feature: Incyte ID No: 700454784H1
  unsure 114, 273: a, t, c, g, or other
ggcattggtggcatgttgcgctaccagctggatatccgttcttttgatgagctttctgatgatgacgatgtgtatgaagactctgactagcaatcagccaatctcatgccaggnctggcccatggaaggacgcaacagctcgacctcgccatacctacgcaggagcacacgaaaagcaactatccaaggattaatgggcatgggccagcgtcatcctcttcaagaggagcttaagactaagatgattttgagtcacaatcatgggagtaacgng

SEQ ID NO: 4299 - DNA, 128 bp, Zea mays
  misc_feature: Incyte ID No: 700454785H1
  unsure 5, 8, 28, 30, 32, 41, 50, 61, 69, 83: a, t, c, g, or other
cttcnganatgatgacttacttgatcanangncatacaganatgacaggngggtacctganagacatcnagcactaaaacganctagtccagctcctgtggttggatatgcattcatctgccaagcgt

SEQ ID NO: 4300 - DNA, 274 bp, Zea mays
  misc_feature: Incyte ID No: 700454790H1
  unsure 62, 116, 134, 151, 168, 182, 187, 201, 224, 255, 260, 271: a, t, c, g, or other
gtggacctgctcctctttactatgggcagcaaaaccctagcatgtatgaacctcctgcaggncgggctaaccctgggccaccatcatcctacggttctgctgggtacgggccacanggtggaggtagtttctcngaatcttatggctatantggatctccttcccacngtggcaatgctggnatgangcagtcttcacctnttgctcaatcctctgggaggaancggcactatgggcagtgggaagctccccagngcccngatgcttcaanagg

SEQ ID NO: 4301 - DNA, 277 bp, Zea mays
  misc_feature: Incyte ID No: 700454791H1
  unsure 6, 18, 51, 55, 89, 92, 96, 121, 128, 136, 140, 145, 152, 155, 165, 173,183, 188, 198, 206, 210, 215-216, 226-227, 235-236, 240, 250, 252, 265, 267,273: a, t, c, g, or other
tgtgancctccctcagcngcgtcgcgtcgcatcctacggtccaaagctctntctnctgcgcagccatggcgaagtaactacccgaccgngancgcngagtacagcgaggctgtggaaggangcgaggngcaagtcngagnccctncatggcnggnaagagctgcnccccgctnatggtccgcntgagngtggcaatcngcggagangttngacgnncgtcaaaggnnagctgggnnattngggaacgatnanacatcattcggantngatcanggcg

SEQ ID NO: 4302 - DNA, 344 bp, Zea mays
  misc_feature: Incyte ID No: 700454793H1
  unsure 138, 171, 213, 223, 233, 254, 265, 276, 284, 287, 292, 295, 298-299,328, 330, 338, 343: a, t, c, g, or other
cctctctcccaccccgcagccgccctagcacccgcgacgagcaggatctgcccagttgctcttgcggtagttcccccaactgttcaccatgcagaacgaggagggtaagactgtgggaccctctatgttccccagganaggtggctcgggcccacaaaacagggatgcatncaactggccaagggacccatgccctcttgttccaagattcanacaattgggnccaactttgngaatgccgaatgggccctgtnatggcatgggntcactttgcancaaacgtntangactnttnctnncaggggatttttgttccgggtgacttcananggttgganccgcna

SEQ ID NO: 4303 - DNA, 331 bp, Zea mays
  misc_feature: Incyte ID No: 700454801H1
  unsure 12, 140, 176, 233, 283, 313, 326: a, t, c, g, or other
cataaacaaganaaagaaaagaaaacccctgttgccagcgacagaagaagaaggggccccttctccttggttgcgttgcgcctccctcctgtctgcgtgcgtgcaatcgacgcagaggcgcgggcgctcgcaaccaccancaaccacgaacccgaatgggctttcatgcgcttccnggcttccaaatggcaatctttctgggcaatgggggagttggctccctaaacatttanggggaggaccatttcggttggaagctttcaaaaatggaaagaaagggctntttccggatatggtttatctttcaaaaatnggaaggagtttancaaaa

SEQ ID NO: 4304 - DNA, 280 bp, Zea mays
  misc_feature: Incyte ID No: 700454803H1
  unsure 139, 242: a, t, c, g, or other
tggatctcaaaggctgagtacgatgagtcaggaccagcgattgttcaccggaagtgcttctaagctcaagggcccccttcgtccccattctatgtattcctttccttgagtgcttttcttataagctactatgtttganatgccggcctttgagcaggcaatgttgttggatctgtatcttgtggatcactacaaatgcatgcgttgctccatcttctttcaatgccaagtttggctgtcanaacttgctagtggggaaaacaacaatgacaacagtggt

SEQ ID NO: 4305 - DNA, 280 bp, Zea mays
  misc_feature: Incyte ID No: 700454804H1
  unsure 237: a, t, c, g, or other
gcacacatactacaccccttagccccagtgaggattcttcccctgttgaaagcggcggcaaagttggactccctctgaatgacactaacaaggctgaaggaaccaatggagagaacagaaaaacaagtgaagctttcgggcctctgacggttccgtattgtcacctaccgaaagacaagagccaggctagtattgagggtaaagatagttttcagaagaagacttctctagaagccntgatgggagagacggtggaggtgagctacaagtctacataccc

SEQ ID NO: 4306 - DNA, 279 bp, Zea mays
  misc_feature: Incyte ID No: 700454806H1
  unsure 161: a, t, c, g, or other
attccctcccctagccgccgccgccgctcgtctccctgagaggtgccgggaccgaggaactggccgagttctaggtagagaatcggttttgcttgtctcagcacgggtctgctgcgtctggtggtggtgaaggggagaaattcgtgaagatctgttccggntcaaggcgtgcgatctcgggaatcaggggtttcacacatagcttcgtcgatttgaatttgatgtactaatggagtctaagggtggcaaaaagtctagccagtagtcgttccatgatgt

SEQ ID NO: 4307 - DNA, 284 bp, Zea mays
  misc_feature: Incyte ID No: 700454807H1
  unsure 29, 107, 115, 157, 159, 161, 163, 174, 184, 252, 267, 277, 281: a, t, c, g, or other
ccggacacgcgacaacaacctgctggggnaagttcgagctctccgggcatcccccctgcaccccgtggtgtgccacagatcaccgtgtgctttgacatcgacgccanacggcatnctgaacgtgtctgccgaggacaagacaacggggcagaagaantntngnccacaatccancaacgacaangggccgtctctcccaaggaggagatcgagaagatggttcaggacgtgtagaatacaagtctgaggatntaggagcacaagaanaaggtggagncaanaac

SEQ ID NO: 4308 - DNA, 236 bp, Zea mays
  misc_feature: Incyte ID No: 700454808H1
  unsure 198: a, t, c, g, or other
tagcatgcttagaagccacacttatttaacctaatgacaaacatcgaacttacttaatcttcttcccttttttgttgtctcctggtgaggttggtcgatctgatggtcagtcagtgtgtagctgggtagctatgttgtgtacaggcatgagttgtatgctggtgaactgcttttaacagtcccaaagttttgtaaccnggtttttctcttgctgggaaaggggattgttggaactg

SEQ ID NO: 4309 - DNA, 277 bp, Zea mays
  misc_feature: Incyte ID No: 700454809H1
  unsure 16, 36, 62, 117, 168, 181, 189, 218, 221, 238, 255, 261-262: a, t, c, g, or other
tgatttctcgtccgancagcggcggaggagagaganagagcatggccgaccacaaggaggancctgtgccggaagtctgtgatggacaagatcaccgagaagttccacggcgggganctctcgtcgtcgttcgtctgactcggacgacgagaagaaggggtctcgttngcgtcggcggcgnaagccatnaaaggccaagatctacccgccttttcgcnggnaagaagccccgtccatnccgtcttcggcggcggnaagctnncgatttatctatggg

SEQ ID NO: 4310 - DNA, 283 bp, Zea mays
  misc_feature: Incyte ID No: 700454817H1
  unsure 82, 115, 158, 251, 257, 259: a, t, c, g, or other
ctgatactgatgcttcctcccactataaggttccgttctcaagaactgtctacattgagaaaactgattttcgcctaaaggnctcaaaagactactatgggctagcccctggtanaatctgtcatgctaaggtatgcggttccccataaaaatgcacngatgttatctctggtgatagtcctgatgataatgttgaaattcgagctgatatgatccttgaagacttctaaaactgaggggtgttttcactnggattngntgagcccaccacctggtgtagagt

SEQ ID NO: 4311 - DNA, 275 bp, Zea mays
  misc_feature: Incyte ID No: 700454819H1
  unsure 88, 112, 116, 159, 171, 181, 194-195, 197, 247, 256, 259: a, t, c, g, or other
gcgtcccagcccctacccgcttcctctcgcgccggcctttggggctctcaccctgagcggtaggaatccgcagggctccagttgggtnccagaagcatccaagtcgttggcngganaccggaaatggcggaaaaatagggggcgaagttggggcggaangagatggaagancgggaacagngaaggggaggcgnngnaggtggatttgaagtttcgtctcttctatggctccgacatcggccccgtncgctgcaangcnggctaccaacaacggt

SEQ ID NO: 4312 - DNA, 252 bp, Zea mays
  misc_feature: Incyte ID No: 700454820H1
  unsure 136, 154, 186, 191, 194, 199, 219, 231, 244, 251: a, t, c, g, or other
attcgcttatgctgtccaagacttatcttacgttatgtctgtaggcttttgttattacaagtactcaagttttgagtttttgagatgtggctatgacaatgtgatgaagaaccctaaaccatcgtattagagtganacttgttctatatagagntccaagtttcttgaacctcaaaacttgctctngtgangcncaganggttttcagtcgggcttttnaatccgagtcanccgattttcgaantgttgcng

SEQ ID NO: 4313 - DNA, 278 bp, Zea mays
  misc_feature: Incyte ID No: 700454821H1
  unsure 257-258, 262, 266, 273: a, t, c, g, or other
cgtagtggttcgataataaaacccagcggaacaaagaaaacgtgtaccagaaactgtttgcaaacaccggtggcctttttttttgtgttgaaccaccattagttgagccgtgagggaatggtgaacaagctttccacttgctcatttccgagcgcttctctttgattgtatccatggtttggactcatgactgtacgtcttggcagttggcttggcacccaggaatctaatccactgggagttgctgctgttaaaannaaanaaanaaaaaanggggg

SEQ ID NO: 4314 - DNA, 279 bp, Zea mays
  misc_feature: Incyte ID No: 700454826H1
  unsure 11, 129, 151, 224, 227, 246, 266: a, t, c, g, or other
agcagatacanagcggttctgtgtgcaggaagccgggaagccgtgcaatccccttgtgagcctgctgcttgaggttgcggctgggttcatgtacccaaaggcacttgctgagggattggagggggaatnatccatgtatgtttccgggtgntaacttgcatccaagggaacattactgggctgactttttgcccaacaagggtctcagtggtagtatcttcacnggnccattggggaatattagcntcacttaaaggtgctagatnttgctaacaataa

SEQ ID NO: 4315 - DNA, 268 bp, Zea mays
  misc_feature: Incyte ID No: 700454827H1
  unsure 36, 184, 205-206, 217, 228, 257, 267: a, t, c, g, or other
attctctgtatgcatggtggtctatctccggagttnaacaagcttgagcaaatactcaacctgaatcgccccacagacgtgcctgatactggattggctctgtgatcttctttggtctgatccttccaaatgaagcaacaggctgggccatcaatgatcgtggtgtttcattcacatttggtcntgataaaagtttctgaatttnntggagaagcanggatttggacnttatcgccgagccacatcaggttgtcgangatgatacgna

SEQ ID NO: 4316 - DNA, 278 bp, Zea mays
  misc_feature: Incyte ID No: 700454828H1
  unsure 16, 34, 132, 194, 205, 211, 220, 233, 270: a, t, c, g, or other
cgccggcgcctccacntcgttttcctcactctcncctccagctcagggtccggcggcgaagggaaggcaagatgtacaccgcgaggaagaagatccagaaggagaagggtcttgagccctcctagttcggangactccgttgcccaggctttctttgatctgggagaacgggaaaccaggagcttcaagagcgnacctcaaaggnacctgntacatccancaatgctaatccnagatgggatggtgaaccgggatttaggaaggctgttntccatcac

SEQ ID NO: 4317 - DNA, 270 bp, Zea mays
  misc_feature: Incyte ID No: 700454830H1
  unsure 59, 69, 119, 150, 183, 187, 234, 256: a, t, c, g, or other
ctccccgagtcgatcggtccagtccgagggaagaaggcaagaagctcccggcgcgcgcncgcaagcgangaggaaatggcgaccagcaacggctcaggggtcgcgcagggggatgaggngaagacgccaccgcttgcggggtcgatcggngggtacgagtccctggcacaggctcctggaggncaancttttcccccgatctattcccatgaagcaagtctatttcttctgggnacttaaatgttcacgacttctngaagctatctcact

SEQ ID NO: 4318 - DNA, 270 bp, Zea mays
  misc_feature: Incyte ID No: 700454831H1
  unsure 48, 61, 111, 147: a, t, c, g, or other
cttcccgaagctggcggacgtggacctgttcctccggatcatctgcanccaaggccaaggncgtcagcaagcggtgggacagcctcttcaacgagctgctgtccgagtacncgctctccggcggcaagcagggcgaccacaactctnaagactttcgtgcacctcttgctggtcgctggcagaaagactacggtctcaccacggataacatcaagggcatacttgtgaacatgttcgaagcagccatcgagacatcattcctggtgtgga

SEQ ID NO: 4319 - DNA, 272 bp, Zea mays
  misc_feature: Incyte ID No: 700454832H1
  unsure 4-5, 41, 64, 95, 138, 162, 169, 175, 254, 268: a, t, c, g, or other
ggannacgcccctctcgtatcagatgatggtgaggttgttnatctaatcaccgccaaggacgtngagcgcatccggagctatcccaagctgggcnagccgtctcttggagccaacgggaagtttgtagttgcggcttnccattgggactcgtgaagatgacnagggaanactggnagcaactagttaaggcgggggcaaatgctatcggtgattgatagttcacagggggaattccaatataccagctcgaatntgataaagtttgcnaaga

SEQ ID NO: 4320 - DNA, 300 bp, Zea mays
  misc_feature: Incyte ID No: 700454833H1
  unsure 3, 24, 26, 68, 101, 103, 105, 113, 119, 163, 183, 189, 196, 205, 214,228, 238-239, 242, 244, 259, 262, 264, 279-280: a, t, c, g, or other
ganaaagtggatgcagaggatgcnantgaggctggagaagatggtgcttcggcggaaggtaaatgtancgatgtggagattaaagatgctggaaaatgctnangnacgagaanccaagntgtccccagtggcagggaagactggacgcagttgacgattaagnaaggtggctgaaaatgtggngattgnaaagatngctgcaganacgactggngggaagttgacggntaagaaaagnnggnanccccctacttgtagnttncngcaggagtaaggacnntgggtaaggtggatgataaa

SEQ ID NO: 4321 - DNA, 152 bp, Zea mays
  misc_feature: Incyte ID No: 700454835H1
  unsure 51, 59, 128, 133, 140, 144: a, t, c, g, or other
ttttgagtctgtaacgttagttgtttgtagcaagtttctatttcggatctnaagtttgngcactgtaagccaaatttcatttcaagagtggttcgttggaataataagaataataaattacgtttcantaaanaaaaaangggncggccgcc

SEQ ID NO: 4322 - DNA, 275 bp, Zea mays
  misc_feature: Incyte ID No: 700454836H1
  unsure 45, 229, 270: a, t, c, g, or other
agatgtgactcttgggtggtctgcatacagcacacttgcttctanctatgtaaatgctggacaatttggaaaagcagaatctgctctgaagaaacttgagggccttatcagtgctcatgatgacagacagccctttgatttcccttctgagcctatacgcttcactaggaatttgagcgaggtcatagggtatggaatgtgataaagtcccaaatttctcgaaggtaantaacaaccaagctaccttgggcatgcttcacggctctttanaagct

SEQ ID NO: 4323 - DNA, 156 bp, Zea mays
  misc_feature: Incyte ID No: 700454837H1
  unsure 32, 57, 59, 62-63, 71, 83, 87, 153-154: a, t, c, g, or other
aggacaagatcatggaggtcgcctcgctcganaagttcctgcaaggagcgcatcaangnacnncggcgggnaaggctggcaanctcngcgaatccgtcatcatctcttcgcgagaagaccaaggtcaccgtcaacctttgacggacccttttnnaa

SEQ ID NO: 4324 - DNA, 276 bp, Zea mays
  misc_feature: Incyte ID No: 700454838H1
  unsure 2, 82, 86, 139, 164, 174, 199, 227, 234, 241: a, t, c, g, or other
gnggacaagatcatggaggtcgcctcgctcgagaagttcctgcaggagcgcatcaaggtcgccggcggcaaggctggcaacntcgncgaatccgtcaccatctctcgcgagaagaccaaggtcaccgtcacctctgtanggacccttctccaagaggtacctgnagtacttganccaagaagtacttgaagaagcacancgtgcggggattggcttacgcgtggttnctgccancaaggancgaaaagtctatgagctccgcgacttcaacattgt

SEQ ID NO: 4325 - DNA, 276 bp, Zea mays
  misc_feature: Incyte ID No: 700454841H1
  unsure 27, 247: a, t, c, g, or other
cagctgcatcaggggcacaggatcagngcagaaaccgaccacatggctagcggatgctacagatcagcagaaactacggcgaattttacaaataatgctatgtctcagtcccaacctcaatggaccggtccgtcccctgtggtccgactgtgcagtgaacagtgagacgcttaacaacccagcagttggtggattgatgaaggaacaatcagagtgtcccagtaatattccccagagttgcttaaantcgttgactccatgcccttcaaaagtcag

SEQ ID NO: 4326 - DNA, 277 bp, Zea mays
  misc_feature: Incyte ID No: 700454842H1
  unsure 37, 54, 60, 197, 215, 228, 239: a, t, c, g, or other
cttgtgaccctccctcagccgcgtcgcgtcgcatccnacgatccaaagctctanctgctncgcagccatggcgaagaactacccgaccgtgagcgccgagtacagcgaggctgtggagaaggccaggcgcaagctccgagcccttcatcgccgagaagagctgcgcccccgttcaatggttcggcttcgcgtggcantcccgcggggaaggttcngacgtgttcgtcnaatgaacgggnggtccaattcggcaacgatgaaggcaatcagtcggatt

SEQ ID NO: 4327 - DNA, 274 bp, Zea mays
  misc_feature: Incyte ID No: 700454845H1
  unsure 2, 226, 238: a, t, c, g, or other
cntgtgcttggtgcagtcacctcactagtttccggctttcttggaatgaagatcgcaacttatgcgaatgcccggacaactttagaggccagaaagggtgtcggaaaggcatttattactgccttccgagctggtgcagtaatgggcttcctgcttgctgccagcggtcttttggttctttacattgctatcaatttgtttggaattattacggtgatgactgggnaggtctttttgnagctattactggttatggcctgggtggttcttctat

SEQ ID NO: 4328 - DNA, 283 bp, Zea mays
  misc_feature: Incyte ID No: 700454846H1
  unsure 50, 171, 233, 264, 280: a, t, c, g, or other
gaagaagctgcggaacgtgtcaagagtgagatgaagggggcgaacgtganctgcaaaaggataattatttcctgtctgatgtgaaggagaaagagaggaggaagcgagatgaagagagagctgagatgtatggaaaagccatggcgttccttcaagaaccgggaaagtgcnttccaatctggacagctgggggaaaaggaaaagggtagggaaaaaggatgccgtgatactcntattgccagggggccagctcgggccaatgtnaatatacggggatttnttt

SEQ ID NO: 4329 - DNA, 284 bp, Zea mays
  misc_feature: Incyte ID No: 700454847H1
  unsure 12, 93, 101, 116, 173, 190-191, 193, 217, 231, 246, 249, 257, 261, 281: a, t, c, g, or other
ccagctcgctcntcgccccgcccccttctctcagccggcgacgcctcgggcgtccctaccctgccccctctcgggacccccacgccgtcggcnaagaggcnggggcaagagtccgntccagaccccgcggaggaatccttgatataacctgatggtatgcttgatgagccttnggaacccaattgctgtnntnaatggatgggtttaagaatgaggncatccaattgggtntaaactcccattagnagnttttcganattngcacgggctccttgggaganaaa

SEQ ID NO: 4330 - DNA, 183 bp, Zea mays
  misc_feature: Incyte ID No: 700454849H1
  unsure 3, 18, 41, 56, 59, 65, 70, 72, 99, 130-131, 155, 157, 159, 162, 165,167-168, 170, 172: a, t, c, g, or other
gantcattctttttgctncatgcatgtgctcataatcccancggtgtagatcctanggncggacnatggntngaaatatcccatcagtttcaaggtganaaaacattttccattctttgacatgggcatnnccaagggttccccagtggtggatncnancgntgngnngncnatggcattcct

SEQ ID NO: 4331 - DNA, 274 bp, Zea mays
  misc_feature: Incyte ID No: 700454850H1
  unsure 190, 203, 269: a, t, c, g, or other
ccaggggccgaacgcaaagctggttgcccgtgcacagggcttgcatatccaagccggcaactgggtcaactccttcagcctagttttcgtggatcaaaggttcagtgggtccacgcttgaagtgaccgggatagtagttgaatccggggagtgggctattgttggggggcacggtcagtttgccatggcnaacggtgtcatcnttcaagaagttccatgagcagagaagcgaagggaacatcataacaactcaccatccatgctttctntccgg

SEQ ID NO: 4332 - DNA, 276 bp, Zea mays
  misc_feature: Incyte ID No: 700454851H1
  unsure 4, 122, 124, 165, 187, 204, 211, 216, 244, 250, 255, 259-260, 264,266-267, 270: a, t, c, g, or other
cgtnctccccccaggctcctcttcctcgctttccctccaccccgggcgcaaaccctaaccctaccgtcgctcgccccgcggcgttctgccaatggcgcgccccgtgtgagtgtgcgcgaganangggtagactttgaggccgctaaccggggaggagagcgaganatgtataaaacaggggggagcngggggtatgggctgggntggaacngtaanctgattcaacgacgcgctggattaatcntctcgnggagngcgnncgcntnnctntccagt

SEQ ID NO: 4333 - DNA, 282 bp, Zea mays
  misc_feature: Incyte ID No: 700454852H1
  unsure 223, 247-248, 259, 275, 277: a, t, c, g, or other
gtaatttcacctgatggcttgtttccttcactctaccgagaagttatacggagagccccacatgaattcaagattgcttgcctggaggacattaaggcactctttccttctgattacaatccattttatgctgggtttggtaacagagatactgatgagctcaggttacaagaagatgggaatacctaaaaggcaagatttttatccatcaaccccaaagggntggaagttggctgtccaacagttnntgttggatgtngaaggtcctaaaaggncnctaaa

SEQ ID NO: 4334 - DNA, 267 bp, Zea mays
  misc_feature: Incyte ID No: 700454853H1
tcgaccgctccgggctctacaaccccacagagcactcgcacgagccgtcgtcggaatccgagctcgtcaagcacatcaagagcatcataaagtttcggagtgggccaatcagcatagctgaatacatggaggaggtgctgacgaacccacagtcaggattctacatcaaccgtgacgtgtttggggaatcaggggatttcatcacctcgccagaggtcagccagatgtttggagagatgattgtgtatgggcaatgtgcctctgggg

SEQ ID NO: 4335 - DNA, 280 bp, Zea mays
  misc_feature: Incyte ID No: 700454855H1
  unsure 26, 39, 70, 100, 115, 119, 143, 160, 172-173, 177, 185, 193, 204, 208,238, 240, 250-251, 255, 269, 278-279: a, t, c, g, or other
gaaaagctcagtgatgaagccattgnagatgcccttganaaggttgtgagattgctggcatacatcagtnataaagacctgtttgccgagtctatagggnagaaacttggccagnagantacttttccgacaaaagtgcctantgatgagcttgagagangtaattctgacnnagcnccaaggcnaacagtgngggggggcagnttanttcccaaaatggagggcattggttacgggncntactgtcgcnnaganatccccgagacttnttttgaggnnt

SEQ ID NO: 4336 - DNA, 268 bp, Zea mays
  misc_feature: Incyte ID No: 700454856H1
  unsure 211, 267: a, t, c, g, or other
cagagtccagagtccagacgccagacgccctctacttctcttctctctagttatacatttcaaactcttggccgccgcagcggtctctgttcgccgcgccccgccgcagaaatggcgctgccgaatcagcaggttgtggattacccccagcttcaagctcgtcatcgtgggcgacggtggaactggcaaaaccacatttgtgaagaggcancttactggcgatttgagaagaatatgagcccaccaattgggtgttgaagttcaccnc

SEQ ID NO: 4337 - DNA, 264 bp, Zea mays
  misc_feature: Incyte ID No: 700454859H1
  unsure 104, 152, 197: a, t, c, g, or other
cagtctagtccgattcaaacccgcccgttccccgtgtccgagccacgcaagacgagctcaatccccagaggccagagccagctgctcggcgctccacgcgatgncgcagaaggagaccaatggcagcaacggcgagcacatctccacccgcncgccgccgaccccgtcgcccctccgcttctccaaagttcttccangctaactgcggatcctggtcactggtggggcgggcttcatcggctcgcaacctcgtggacaagctca

SEQ ID NO: 4338 - DNA, 276 bp, Zea mays
  misc_feature: Incyte ID No: 700454861H1
  unsure 35, 103, 107, 140, 160, 194, 229, 238, 242-243, 254-255: a, t, c, g, or other
gcaagcggagggaccaaaccgcaaaagcgcacagntcccgttccccctccgacccgttcattccgcttggttttctcctcctccgtcctcttcgctccccgtnagancatccctgtgaggctgtgacgcaaccgggcgcnggcggtctctcttgcaccanagggcaacgccgcctcccgcgcaacgtgttctcnttcttccggggattcagatctggggattgctattntgtccggtntganntcggtccgtcnngaggcgccgtcgagggaagct

SEQ ID NO: 4339 - DNA, 275 bp, Zea mays
  misc_feature: Incyte ID No: 700454862H1
  unsure 270: a, t, c, g, or other
ccggaacagagcgaggcgacgccgagggcacctcatctccggcgaagggaaatggcgaccgttccaggggatctgatctggcagattgtgaggaagaacaactcttcctggtgaagcagtttggcaacggcaatgccaaggtgcagttcaccaaggagcccaacaacctctacaatgtacatcctacaagtactctggcttagcaaacaagaaaaactgtaacgatcccagccagctgctggaaaaggattcggctgtggtcctctctantaaca

SEQ ID NO: 4340 - DNA, 267 bp, Zea mays
  misc_feature: Incyte ID No: 700454864H1
  unsure 153, 156, 163, 203, 263: a, t, c, g, or other
cagtctagtccgattcaaacccgcccgttccccgtgtccgagccacgcaagacgagctcaatccccagaggccagagccagctgctcggcgctccacgcgatggcgcagaaggagaccaatggcagcaacggcgagcacatctccaaccgccngcngccgacnccgtcgcccctccgcttctccaaagttcttccaggctaanctgcggattcctggtcactggtggggcgggtttcatcggctcgcacctcgtggacaggcnatgg

SEQ ID NO: 4341 - DNA, 177 bp, Zea mays
  misc_feature: Incyte ID No: 700454868H1
  unsure 27, 41, 50, 69-70, 76, 102, 107, 109, 112, 119, 133, 137, 144, 149, 164,167, 176: a, t, c, g, or other
agcagctcttgcggtcgtccctcagcngcgtcgcaccgcancgcattctnacgattcgaagctctctgnntcgcangggatcatggcgaagaactacccaanccgtnanctncgattanatcgaggccgtcgntaangccaggngcaangatccgagtcccttnatngtcgggaant

SEQ ID NO: 4342 - DNA, 276 bp, Zea mays
  misc_feature: Incyte ID No: 700454869H1
  unsure 38, 54, 59, 73, 80-82, 120-121, 131, 141, 149-150, 180, 196, 222, 227,229, 234, 252, 272: a, t, c, g, or other
acagacctgatcgatcgatgagcgagagggagcactcngagtgtcgtgtctttnccctngccatttcttgctntcttctnnntcccgtcccgggaggcgaaaaaaaaagaatctggcttnngctaggcggngggcgttcgnttgctgcnncttggcttcaagagttaaaatttaactaancttgtcaaggtcttgntccatcattgattccgggtgtcggtntttangnagtcngatggactgttagtattnggcgttcgcgtcgggttganaggg

SEQ ID NO: 4343 - DNA, 274 bp, Zea mays
  misc_feature: Incyte ID No: 700454870H1
  unsure 7, 101, 109, 158, 182, 194, 198, 215, 223, 225, 227, 235, 243, 256: a, t, c, g, or other
gtcagangagttacatgacgttccattgtttttcagtctccataacatagcaggcactgttaagtgcacattctccatctttggttacgtttcggtctgcngttctaanatgcagggtatcggatctcaagcacccatgttaaccccactgggattanatctgatggccccttgggatgtgntttgggacaatnatgngggggctgggtgaagantaatcccnantnagggaacnagcccagntgattcacctggnacggtgatccctttcaaa

SEQ ID NO: 4344 - DNA, 268 bp, Zea mays
  misc_feature: Incyte ID No: 700454872H1
  unsure 52, 120-121, 161, 166, 189, 225, 230, 240, 255: a, t, c, g, or other
caaactgaagcacgaggagctctgcatgttcaggccgtacagctgcccgtangcaggttccgagtgcctgatcgcaggcgacgtcccgttcctggtgtcccatctcatcaacgaccatanngtgggacttgcacgagggctgcacgttcaaccaccggtangtgangcctaacccgtacgaggtggagnatgccacgtggatgctcactgttttcaaatggtttngggtnagcatttctncctgcacttcaaggngttcgtgctgggg

SEQ ID NO: 4345 - DNA, 175 bp, Zea mays
  misc_feature: Incyte ID No: 700454879H1
  unsure 13, 65, 69, 81, 93, 110, 121, 123, 133, 140, 143, 148-149, 159, 164-165: a, t, c, g, or other
gctacctgggatncaaagcttattcattggcaactcagaagtggtagtcgaaacgaagttaaggntgcncaatataaggtnttgatcggagtnactcatattccagaggnttaataccctnanagctatagangatggcntanacatnngttcggctgnaagcnntggcacaact

SEQ ID NO: 4346 - DNA, 275 bp, Zea mays
  misc_feature: Incyte ID No: 700454880H1
  unsure 199, 259, 268: a, t, c, g, or other
ctaaacaagaagcagctgccagaagggtccatccaacactgcatctgcctacccccgcgcagcccacggcacagatcgctgcaccagctacaagccaaccgcagcaaccttcctttccgtccgctgcgacttcctcaagcgccttctcaacctttagcactccggctttccgctccatcctcgtctagttctgtttgcnactccaacaattccagctccatcgggcaacctttttggtgcgccaagatcggctcagttngaccacacnatttggg

SEQ ID NO: 4347 - DNA, 269 bp, Zea mays
  misc_feature: Incyte ID No: 700454881H1
  unsure 251: a, t, c, g, or other
tcagttcagcatcatagttcttgatgatatcgaaaggttactggagtatgtagccattggaccacgtttttcaaacttgatctctcaaactcttctggtcctcctcaagagggttcctccctaagggaaaaaacctgcttgtgattggaacaacaagcgaggttggcttcctagaatctgttggaatgtgtgacgtgttctctgtgacataccatgtccccaagctgaaaaaggaggatgcgaaaaggtantgcatcatcttgagtgtt

SEQ ID NO: 4348 - DNA, 278 bp, Zea mays
  misc_feature: Incyte ID No: 700454884H1
  unsure 49, 52-53, 181, 218-219, 256, 258, 261, 263, 269, 271-272: a, t, c, g, or other
cgctgtcatcaagcacatgtcaccggacatagagaagatccgtcgcctngtnngccagtccaagtgcctccaggacaagatgactgccaaggagatctcaacctgggctggcggtcgtcaagcaggaagaggagctgtaccagaagctgaacccgggcgcaaggtcaccgggcgtctactnggtgggcattcgaagttgccatatccttcaaacaccnngctccgagcgagtatgatgtgggacatcatcgatgantngcnangggggncnntgcctt

SEQ ID NO: 4349 - DNA, 175 bp, Zea mays
  misc_feature: Incyte ID No: 700454888H1
  unsure 2, 5, 24, 51, 60, 68, 92-93, 119, 121-122, 127, 131, 147, 163, 165: a, t, c, g, or other
gncgnattgtacgccagcaaccanaattctatcatttgcctttatgttcanagcacaccngttctgtntgacaattatggctttttgtatcnncgattgtacatttttggtccagttancnntgcangggntggtcttggcaaagtnaatttctgctcggcgnanatggttagtg

SEQ ID NO: 4350 - DNA, 196 bp, Zea mays
  misc_feature: Incyte ID No: 700454893H1
  unsure 37, 41: a, t, c, g, or other
gcataccagaattcagccatctcactggaggggaccngctngcgacagtgactcgtagaaaatcctgagaggctccctctcctccggaggatcgaacttctggccgggcaaggagtagaccttcttgtcggccttccctctacctctacctctgctgctgctggtggtggttccacgcttggtagctgccgcagct

SEQ ID NO: 4351 - DNA, 293 bp, Zea mays
  misc_feature: Incyte ID No: 700454894H1
  unsure 50, 200, 226, 235, 246, 256: a, t, c, g, or other
gggccgcggataaccgacctgctgattctggaagcgacggaccacatcgngcgggcggatgcacaagacgaacttcgccggcatcaacgtcgagttaggcgccaactgggtggagggcgtgaacggcggcaagatgaaccccatctggcccatcgtcaactcccaccctcaaagcttccggcaaatttccggttccgganttcgactaaccttcggttcaagaacngtcttaacnagggagggaanggtggccgtntaaggatggaaggattaacgttccagaaggagaattt

SEQ ID NO: 4352 - DNA, 275 bp, Zea mays
  misc_feature: Incyte ID No: 700454902H1
cagacaaccagctgtttgttgcaacatgcggcccagctcgagataccagtgcaggatatgttgcttggggacactccactcttgttggaccttttggagaggtgattgcaacaactgagcatgaggaggcaactataatagcagaaattgactactcactgattgagcagaggaggcaatttcttcctctgcaacaccaacgccgtggcgatctctatcagctggttgatgtccagaggctgggttctcattagcacagggacgaagcaggagag

SEQ ID NO: 4353 - DNA, 270 bp, Zea mays
  misc_feature: Incyte ID No: 700454904H1
gtgaggacacccagttctagtagagcactttttttaaagctcccattttgtaaccactagtttgcggttgacttgagtactctggtgacttcctgcgtcaagcgttctcaagctgtgagaatgtgcgcagtccaggcaggttttctctcggagagttaagtcttcccttgaaggcagggaagcaggatggatacacatatatcacacgcataaaacaccaggtgcgggagcagcccagactcaaggctgactaaactggaggtgataccg

SEQ ID NO: 4354 - DNA, 271 bp, Zea mays
  misc_feature: Incyte ID No: 700454906H1
taggttacggtctgagacatcaccgccaagctgggcatcggggagatggccgagactgaccccaagaccgtgcaggacctcacctcggtggtgcagacactcctgcagcagatgcaagataaatttcagaccatgtctgaccagatcattgggagaattgatgatatgagtagtcgcattgatgatctggaaaagaatatcgcggacctcatgacacaggctggggtggaagaactggaaagtgaaaacaagatactgccacgcaaaagag

SEQ ID NO: 4355 - DNA, 273 bp, Zea mays
  misc_feature: Incyte ID No: 700454907H1
aaacaagttccggtccaatttggaggccttttcaaggaggatgaccctgagttcacaaccttggacactgtcactgagctcactatcaaaccatcgtcgaaagaaaccattgagatccccgtcaccgagaactccgcgattgtatgggaatccgggtgctcggttgggaggtgagctacagcgccgagttcacccctgacaccgagggtgggtacactgtcattatacagaaaacaaggaaggtgcccgctaacgaggaaccaatcatgaagg

SEQ ID NO: 4356 - DNA, 277 bp, Zea mays
  misc_feature: Incyte ID No: 700454909H1
  unsure 19, 26: a, t, c, g, or other
aactaccagaacatcccgnccacgcncttctaccagagcctccgccgcctcaagcacctgcgtcaagttccaccagtacagcctcaagttcaagctgcacgccaagttggggaagctgccaaactatgcggtgattgagcagagatacttcgattgcgagatgttcccagcaaacgatgaccatccgtcgcatgatgtggcgagggggcagaggttcgtgaaagaggtttatgagacactaagggccagttccgcagtggaacgagactgccctgat

SEQ ID NO: 4357 - DNA, 277 bp, Zea mays
  misc_feature: Incyte ID No: 700454910H1
  unsure 82, 140: a, t, c, g, or other
gcaccctcccgcccaccgccgtcgccgcccagccgcagtaaggaggaaggagcaggaagatgccggcggggcacgggctgcngtcgcggacccgcgacctgttcgcgcggcccttccgcaagaaggggtacatcccgctncaccacgtacctgcgcacctacaagatcggcgactacgtcgacgtcaaggttaacggcgccgtgcacaagggcatgccgcacaagttctaccacggccgcaccgggagcgtctggaacgtcaccaagcgcgccattg

SEQ ID NO: 4358 - DNA, 106 bp, Zea mays
  misc_feature: Incyte ID No: 700454912H1
aggatggcttatactgaagagaagtggcgattcggtacgcctaattgtgcttatagggcaattgaaccggcacagtaataaagttgcagcgaatgggcttctgtcg

SEQ ID NO: 4359 - DNA, 277 bp, Zea mays
  misc_feature: Incyte ID No: 700454913H1
  unsure 148, 201, 203, 206-207, 242-243, 245, 248, 270, 275: a, t, c, g, or other
aaagatcgacaaggaatatacagatgattacatacaaatttgcaactaccctctcagtgctgcctgctgtttaaatcggatatgcagtgccctggagcagaagtggaacatccaatgaggaacttttgacaagcatgggaatcttgtnttattatatacatcttacatgtacttccctctgcttatgtacaatgtttgaangntannaccaaatgtttcagtgtgggcattatgccgtgttnngnccncgtttcagggtttaaaactggnttgtnca

SEQ ID NO: 4360 - DNA, 147 bp, Zea mays
  misc_feature: Incyte ID No: 700454914H1
  unsure 36, 50, 64, 92, 98, 106, 109, 121, 124, 127: a, t, c, g, or other
ctccctcaccaaagcccataaaaataaaaaattatnacaaaccctgaganccaaaatgaacganaatgctgttcgcttcattcattgcgccnacaatncctaggcntanccgccgcagtantgntcnttctatttccccctctattg

SEQ ID NO: 4361 - DNA, 280 bp, Zea mays
  misc_feature: Incyte ID No: 700454915H1
  unsure 38, 182, 191, 202, 206, 210, 234, 240, 243, 251, 253, 260, 271, 276: a, t, c, g, or other
gtgggactggcttcacacccagagatgtcacaccggangcataacaaatgtgagaccaggcgcttctttctgtatcacatttgttatgcttcaagaaagtttgaagattacaccattcgcaatgctatcccgggccacagctggaatcagaggatcaacacttatcatcaacatgccggtcnacccaaatnctgtggcagantgcntggnagcactcctccccagcgctcagcnacgccntgnaagagatngnggtgacnagggggagcanccccntcgc

SEQ ID NO: 4362 - DNA, 170 bp, Zea mays
  misc_feature: Incyte ID No: 700454916H1
  unsure 5, 30, 34, 38, 46, 48, 71, 78, 81, 105-106, 136, 151, 153, 157: a, t, c, g, or other
ccgtncactcaacacagcacaggcagctcnaganaganagagagananagatgtcgtggttcgggcaccancaccacnacnaggcggctcccccggcgtcgggcnncaaccaggtgttcaagatcttctggcgcgncaacgagaactactncntggncgtccgcgaggcg

SEQ ID NO: 4363 - DNA, 268 bp, Zea mays
  misc_feature: Incyte ID No: 700454917H1
  unsure 23, 55: a, t, c, g, or other
tcttccttcccgcggtctctccnccgcctcccagatccggcggccatggcaaggnacccgggctgcaccgtcttcataggtaggtcgtgttgtagacctacacatacctcgtgacaaggaaactagccgaccaaaaggctatgcttttgctgagtatgaaacagaggagattgcccaatatgctgttaagctattttctggtctgttcgacttcataataaaacgcttagattgcgatctctgggcaagacaaaccctcataaatggc

SEQ ID NO: 4364 - DNA, 267 bp, Zea mays
  misc_feature: Incyte ID No: 700454919H1
gtgaaggaagcagggcgcggtggaaagggaaatcttcctctgaacgttgcgccgacagtagtcacttccgagccgtgggacggcaaagacggagaggtcatcgaagaggatgaattctcccttgacgagctcatgggcgacagtcctcagtaaacgatgagttgtagttctgacgattctgtaactgatctgcgtgccgattagcctgactgtaaatctgaggaactctgatgttttaaaaactcgttaaattttcagattttggat

SEQ ID NO: 4365 - DNA, 269 bp, Zea mays
  misc_feature: Incyte ID No: 700454922H1
  unsure 42, 66-67, 101, 113, 179, 191, 217-218, 224, 226, 242, 244, 267: a, t, c, g, or other
caaaatctctgctcgtcccgtgcagaaaatgaagagagtgantccagctttgtctgctccgcgcanntactggagaggttgtccttcgcttcgtatcagcntaagttggttangcatgcagatgtctgtccagttagtaacgctggtgctaactcagagcatcacaaggcaactgatantggttcatcgantgaagtgaagccctgcaacgatacgnntgatgntncaacagtccagtcgtngntgtccgtgagatatgtggcacanag

SEQ ID NO: 4366 - DNA, 272 bp, Zea mays
  misc_feature: Incyte ID No: 700454923H1
  unsure 169, 171, 212, 215, 218-220, 222, 232, 237, 239, 245, 248, 252, 257, 259: a, t, c, g, or other
aacccattttcgacaagcaatccattttcaacaaacaatccatttgctcctaagcctgctccaactattacttcaccattcaacacctcatttaacaatgcatcagttacaagttcgagcccatttcacatcatcccctagtaccacaatgtttgggcaaacaggtgtntntacactttcagcaagtaattcgccatcagtgtttggaaatnccnatnnngntccggttacntcagntnatttgncanatcngtgananatgaagccaagtc

SEQ ID NO: 4367 - DNA, 271 bp, Zea mays
  misc_feature: Incyte ID No: 700454925H1
caagcactccacactgctgtgcagaacgagagccacaccatcagtagttagagcgaccaatagatgagttcctccccgtcctttggtctcctggctgtagcagcattactcctagcactgagcttagcacaacatggctccctcgccgcaaccgtcggccccagggtcatcgtcgtcggcgccggcatgtctgggatctcggcggcgaagaggctgtcggaggccgggataaccgacctgctgattctggaagcgacggaccacatcggcg

SEQ ID NO: 4368 - DNA, 277 bp, Zea mays
  misc_feature: Incyte ID No: 700454927H1
  unsure 221: a, t, c, g, or other
aaataataatgcgacaaagcatgttttgcctggtggaattgaggatctttcagggaaggttccacaaaagttctccttgtccagtttttgccacggtatcatgactgaaattggtcgcttcagcaaagatatgaaagaactactacaagagaaggtttttgtcatcgttgttttaggttatatatcctacaatttcgtcattggtgcttattcctactgcnggcccaaaggcaggtccaagagatctacaatatggggagtgccagatctatgtttg

SEQ ID NO: 4369 - DNA, 272 bp, Zea mays
  misc_feature: Incyte ID No: 700454928H1
gggacttttccttgcaacaaggggccctcaacatggtattggacattggctttcatgtggagtacattagcccttcaggggagaaaactttaattcttccataccgacgatatgaagctgaccaaggtaatttttgcactgtttcatcgggatcatacaaacttgtgtgggacaattcatattcttcattcttcaaaaaggtcctcggtacaaggtggatgctgtgccaccggttgttgagccggccttgtcagccacggaactctgaagag

SEQ ID NO: 4370 - DNA, 121 bp, Zea mays
  misc_feature: Incyte ID No: 700454930H1
  unsure 6, 8, 13, 28-29, 53, 57, 79, 81, 98, 105: a, t, c, g, or other
acgcananatcgntcgtcggcgcatctnngatcccctccgtcgatcccaaagntggnagatgcttccgtacaagaaccntncactggaaagagctatncaccctncgaggtggagtcttct

SEQ ID NO: 4371 - DNA, 272 bp, Zea mays
  misc_feature: Incyte ID No: 700454933H1
  unsure 60: a, t, c, g, or other
ccacacagaagcggcggcggcggagcaaacgcaggcgaaggcgagggtgtgagggaaggngcaccagccatggtgcacgtcaacttctaccgcaactatggtaagacgttcaagaaaccaaggcgtccttatgagaaggagcgtcttgatgctgaactgaagctggttggtgagtatgggctgaggtgcaagcgtgagctttggagggtccagtatgcactgagcaggatccgtaatgctgcaaggcacttgctcacccttgacgagaagaa

SEQ ID NO: 4372 - DNA, 270 bp, Zea mays
  misc_feature: Incyte ID No: 700454934H1
  unsure 63: a, t, c, g, or other
cacgcctccgctccgcccacggttccactccaactctccgatctccaggaatccgcggctgangcgccggcgatggcggctcccatggtcgacgccgaatacctgcgccaggtcgacagggcgcgccgccacctccgcgccctcatctccaacaagggatgcgccccgatcatgctccgcctcgcatggcatgatgctggaacttatgacctgaagacaaaaactggtggtgcaaatggttcgattagatatgaagaagagtacacccat

SEQ ID NO: 4373 - DNA, 265 bp, Zea mays
  misc_feature: Incyte ID No: 700454937H1
  unsure 221, 263: a, t, c, g, or other
atcaactttttgagaacacaattggttgtaagtcgtgaaaataaattacgcttgctgatgatttatgcagcacttaacccagagaagtttgaaagcgacaagggtgcaaaattaatgcagttggcaggattatctgctgatgacatgattgctgtaaataatatgcgttgccaatctgggcctgataccaaaaagtctcagtagggggttttacactgaantttgatgttcacaagaagaaacacacaatcgaaaagagcgancg

SEQ ID NO: 4374 - DNA, 267 bp, Zea mays
  misc_feature: Incyte ID No: 700454939H1
  unsure 2, 4: a, t, c, g, or other
anangtcctcctccttcggggacgatgtcgtcgtcgtcgctgcctacaggacgccgatatgcaaggccaagcgaggaggcttcaaggacacctacccagaggacctcctcactgttgttctcaaggctgttctggacaacactagaatcaatccagctgacatcggtgacatcgtcgttgggacggtgctcggccctggttcccagcgtgcaaacgagtgcaggatggctgcgttgtttgctggattccctgaaaccgtcctgttag

SEQ ID NO: 4375 - DNA, 269 bp, Zea mays
  misc_feature: Incyte ID No: 700454941H1
  unsure 2: a, t, c, g, or other
angccattcaccgtttctcattgttgggaggttctaaagaatgaagccaaatggttacacttggagcagggctcacaaaatattgatgtgctggtgaacaaaggtgtagggttttctccaagatgtcggatttgacactgaagaagattgagtattggaagaggtccgattgaacatttggcactgacattcaccaacttgttcaaatagaggaaaaggatatggaaatggagaaagagcgcatgtatgcatgtgtaggtcagggagtg

SEQ ID NO: 4376 - DNA, 270 bp, Zea mays
  misc_feature: Incyte ID No: 700454942H1
attgtgttgaagatgaccaaaggttgctggtctatgaattcatgcctcgtggcagtttggataaccatctttttagaaggtctcttcctctcccatgggcaatcagaatgaaggttgcactcggagcagcaaagggtctggctttccttcatgaagaagcagaaagaccagtcatttatcgcgattttaaaacatctaacatactgctggatgcggagtataacgcaaagctctctgattttgggcttgcgaaagacggacctgtaggtg

SEQ ID NO: 4377 - DNA, 271 bp, Zea mays
  misc_feature: Incyte ID No: 700454943H1
  unsure 38, 170, 268: a, t, c, g, or other
aaacgcaaacttcgtactttctatgagaagcgtatggnccacagaagttgctgctgacgctctgggtgaagaatggaagggttatgtggtccgaatcagtggtgggaacgacaaacaaggtttccccatgaagcagggtgtcttgacccatggccgtgtccgcctgctantgagtaaggggcattcctgttacagaccaaggagaactggagaaagaaagagaaaatcagttcgtggttgcattgtggtggaaatctgagcttctcanctt

SEQ ID NO: 4378 - DNA, 195 bp, Zea mays
  misc_feature: Incyte ID No: 700454944H1
  unsure 21, 66: a, t, c, g, or other
tggagatcgaggtcacgtgcnccgccgcgatgatcctcgtggcgctttacgttgcctacgagctcntcaacccgcgctcctcgcaggcggcagcggcgggcgacgccgacgagctcctcgtgcgggggctggacggcgccgacaagttcaaggggggtgtgagcggcccctctgcctatgtagtgaagttcgaat

SEQ ID NO: 4379 - DNA, 272 bp, Zea mays
  misc_feature: Incyte ID No: 700454946H1
  unsure 230: a, t, c, g, or other
tgcgctgtagatggcagtggttccaggaaggttttttctgcttacttctataggaccctgcgtttgggatgccagcgaaaacaggccgagtttggtaagtgggatggaaaaccaaggggtctgcatatctcttgcgtgcagctctccatcaagtgatgtcctggtggcttcatatcgcccaagagttgagtgccagacgctatcgccacatctcaagcgtctacaccacnatcaccggcacccaccggttcaggaaaactaggatgccacac

SEQ ID NO: 4380 - DNA, 229 bp, Zea mays
  misc_feature: Incyte ID No: 700454949H1
gtctccctgagaggtgccgggaccgaggaactggccgagttctaggtagagaatcggttttgcttgtctcagcacggggtctgctgcgtctggtggtggtgaaggggagaaattcgtgagatctgttccggatcaggcgtgcgagctcgggaatcaggggtttcacacatagctcgtcgatttgaatttgatgtactaatggagtctaagggtggcaaaaagtctagca

SEQ ID NO: 4381 - DNA, 105 bp, Zea mays
  misc_feature: Incyte ID No: 700454950H1
  unsure 98: a, t, c, g, or other
aacgcagttggtcttaggcatagaagccccagaggaacacggccactgccatgcatgagcagggcattgaggttgaccacacgggcccagctcgggtnccttcgg

SEQ ID NO: 4382 - DNA, 261 bp, Zea mays
  misc_feature: Incyte ID No: 700454953H1
  unsure 110, 251: a, t, c, g, or other
gcacgcacacgacccgcagaccgcaccctgtcggcgagctcgctcccgttcccgtccgctgctctccgctgcgacgccgccgtcttccgcgcagtagtgtctacactccnggcgacgatggcggaggacttggttttggacacggcgatccgagactgggtcctgatcccgctctccgtggttatggtcctcatcggcgtgctccgtactttgtctccaagctcatgcgtccccggcgactctccgtctcncgaccccaag

SEQ ID NO: 4383 - DNA, 266 bp, Zea mays
  misc_feature: Incyte ID No: 700454954H1
  unsure 48: a, t, c, g, or other
tccccgacgacgagcacagctgcacagcaaactagcagcgccctcgtnagttccgtctcgttcccaaccactgcctggattcgattcgattgacccgtccgctccaaatcgaatctaatcagcagttttggagttgcggaagggagaaagagagaggagaggggcatggatcaggtgctcaacaaggtggggagctactggttcagcaaaagggccagcaaggaaatcgactccatcggcgacgacatcagctcgatctcaagcag

SEQ ID NO: 4384 - DNA, 265 bp, Zea mays
  misc_feature: Incyte ID No: 700454956H1
  unsure 106, 233, 248: a, t, c, g, or other
tgggtgggagactgggaaagacgagacagcgagacaccactgagacgagagtcagccggcaggtgagacatcgcaggggaaccagctctcaagacggccgacggcngcttgcctacctgctcccatccttcccgagggaccgagaaagataagaaaggcggtggtcaacttgtgtcctgaggtgcccgtagaagcccaaggacaagaaacaaggagaagagtagatctacatntactccaccgatgancgcgtctcggttcatca

SEQ ID NO: 4385 - DNA, 209 bp, Zea mays
  misc_feature: Incyte ID No: 700454957H1
  unsure 38, 83, 86, 113, 125-147, 180, 184, 203, 206: a, t, c, g, or other
gcagtccagcctggcctctgcctgtttcgtgtgtctgnggatctcctgatctccttcctccctgtccttctcctcccctcccnggntacggaggtgctggtgggtgctacggnggagtactacgnnnnnnnnnnnnnnnnnnnnnnntctgtctttttgtttgtggacaagtgaacccanatcntcctcacgggcccatcggnganttt

SEQ ID NO: 4386 - DNA, 265 bp, Zea mays
  misc_feature: Incyte ID No: 700454958H1
  unsure 11, 112, 237: a, t, c, g, or other
tcttgtgaggnactgagatgcaggatttcttcacgcctcccctttgtgacttcaagagcctctggcatctctttctgcaaaggcacctgaatgtgtctgcgtccctgttagnctaatgtgaggaggtggagagacagcccacccttgtgtccactgtgacccctgttcccatgctgacctgtgtttcctccccagtcatctttcttgttccagagaggtggggtggatgtctccatntctgtctcaactttatgtgcatgagctg

SEQ ID NO: 4387 - DNA, 64 bp, Zea mays
  misc_feature: Incyte ID No: 700454960H1
tttggttcatatatttgtaatgtaatgggtaacggataacgttaaatcatgtttgttttagtcc

SEQ ID NO: 4388 - DNA, 273 bp, Zea mays
  misc_feature: Incyte ID No: 700454963H1
  unsure 28, 57, 80, 86, 96, 99, 132, 156, 172, 187, 192, 202, 206, 209, 211,220, 222, 240, 244, 250, 256, 258, 262-264: a, t, c, g, or other
ctcctatctggtataggacggagctgancttctagcaacgtacagtgtatccgccangagtcctttcggggcggtgatcncgccanaaaccctcangtncatgtccaagtaccagggacgtgagatcacgcnggtggactgcgcacgggaggcgangaggctggtccacgcngaagacaagagactnaaggncgaaggattnaagntgncnactgaagangnagttcggcaagggcgtgnaccngtggtnctcganancacnnnggggggggc

SEQ ID NO: 4389 - DNA, 272 bp, Zea mays
  misc_feature: Incyte ID No: 700454964H1
  unsure 137, 230: a, t, c, g, or other
ctcctatctggtataggacggagctgagcttctagcaacgtacagtgtatccgccatgagtcctttcggggcggtgatcacgccagaaaccctcaagtacatgtccaagtaccagggacgtgagatcacgcaggtgnactgcgcacgggaggcgatgaggctgatccacgcggaagacaagaacctcaaggccgaggactcagcgtgggagctgaagaagaagttcggcnacggcgtgagcaccatggtctcgtctacaacgccaccggggc

SEQ ID NO: 4390 - DNA, 268 bp, Zea mays
  misc_feature: Incyte ID No: 700454965H1
  unsure 61: a, t, c, g, or other
cgccgacctgcccagcctccggtcgctggacctccggcacaaccagctgacgggccccatncccggcggggctggtgcaggggcagttccggtgcgctggtcctgtcctacaaccagctcacgggccccatcccgcgcgacgacgcgcgcgacgagatcaacaccgtcgacctctcccacaacaggctcaccggcgacccctcccactgttcgccgccggccggcccatcggcaaggtggacctgtcgtggaactacctcgacttcga

SEQ ID NO: 4391 - DNA, 261 bp, Zea mays
  misc_feature: Incyte ID No: 700454966H1
gacaaagccatcagtggcagcaattgatggtcttgctcttggtggaggtttagaagttgccatggcatgccatgcacggattgcaactccaacagctcaattaggtcttccagaacttcagttaggaattattccaggatttggaggaacacagcgactcccacgactggttggtctgacaaaatctttggaaatgatgctgttatctaagccaatcaagggcggtgaggcacaccaactgggcctggttgatgccttagt

SEQ ID NO: 4392 - DNA, 261 bp, Zea mays
  misc_feature: Incyte ID No: 700454967H1
  unsure 213, 216: a, t, c, g, or other
atctaaggaatgggggacattataacacaagcagaagggatgccactgccagtgcactacaatggagattctagcattggggcttcattgcacaacctcactgatgcgtatcatggaagcaggcgcacttaagcacgactatggatatcatgagtcagctggagagtaaagtcgatgggcgactcaatcagaacctcaggtcactgtcgtttnganattcaagtcctccatcaccagcatcatatgcccaaaatggtcttg

SEQ ID NO: 4393 - DNA, 260 bp, Zea mays
  misc_feature: Incyte ID No: 700454968H1
  unsure 7, 97, 182, 197: a, t, c, g, or other
ggcaganaccaaagtgcccatcgcaccatgtcggccgccgaaaccgctgtttctccgacgacgacgccgcagccgcagctgcaatcggatccgaacnccgccgccgacgcggccagttccaattctctctgggtggccgacgagacgcaaaccctaaccgaggtcctgctccaaccccaacnaaaccacctgtcgcntcctccttctggtgaaggggacgacgggatcactgcctccggtgctctgttggtggggacgcg

SEQ ID NO: 4394 - DNA, 244 bp, Zea mays
  misc_feature: Incyte ID No: 700454970H1
  unsure 47-48, 54, 133: a, t, c, g, or other
gcacgcctcctcctctttcagcaaacacagctagctagcagcacctnntcccantcgcctgtaatcatggcgtattgctgcgacgacggctgcaactgcccccctgactgcgggtgcccatgcgactgctgcnatttgtaccctgaagtggagaccgccgccgccagcggcatcctcgctgcgccgaccaccaaggccagcgccggcggctgcaacacctgcaagtgcggcggcaccagtgcaa

SEQ ID NO: 4395 - DNA, 128 bp, Zea mays
  misc_feature: Incyte ID No: 700454973H1
  unsure 65, 127: a, t, c, g, or other
attcggtggcttgtaaaagcagctggtgctggctgtcagcatcagcacaataagtagtatttgcnagaagtatgtgctggagcagtagcgtcagtggctattttggcttttaagccagctgacctcnt

SEQ ID NO: 4396 - DNA, 267 bp, Zea mays
  misc_feature: Incyte ID No: 700454975H1
attggagggggtgacgcatgcccttcggtccagtgaatatcatgacaggaatgcacaatattatcgaatccttcaagacatggggttgaggagagtagaaatttatgaattcagccgattgaatatggtttacactcttctaagcaagcggaagcttctctggtttgtacaaaacaagaaggtcgaagattggactgatccacgttttcctactgtccaagggatagtacgtcgtggcttgaagattgaggcattgatacaatttat

SEQ ID NO: 4397 - DNA, 268 bp, Zea mays
  misc_feature: Incyte ID No: 700454978H1
  unsure 56, 95, 97, 159: a, t, c, g, or other
ctgggattgctggaattggggttggaaggacattctgactgaattgctcgagtgangggtggggttttggcgcccgttgcttgaggatggagganangccatcgtccgaggcaggcgcgggcaactcgagggccgaggacgacttcaggagctgctgcngggatgaggaagagtgggaggacacggaggagtcgttcacggccggcgtcaccaagggggagctggacgaggcctctgtgcctctcttcttcaaggcgtgtcgagccct

SEQ ID NO: 4398 - DNA, 258 bp, Zea mays
  misc_feature: Incyte ID No: 700454981H1
  unsure 33: a, t, c, g, or other
tccggattcgacctcgcggcctccgagagccgnccgccaccgccggtgaacatcacccgggttctcaccgacgcgcgtgggttctacgtggcggcctccatgctgcaggcttccggtgtagcgagcgagtttgaggccgacgagcgcggtgctggcatcaccgtcttcgtccccaccgacgacgcctttgccggcctccccgccaccgaccgctccagtcatacccgctgagcgcaaggccgtcgtgctccgttccat

SEQ ID NO: 4399 - DNA, 258 bp, Zea mays
  misc_feature: Incyte ID No: 700454984H1
cattgccttgaggtcgtcgattagaaacgattttgttgaaggtgtgcgtgctgttttagttgacaaggaccagaatccgaagtggaatccagccactctggaagaagtaaacatggccgaggtggaatcagttttcgagccattaggggccgaggctgagttgagtgtgtgaaatatggcctgccacactcagttttcttatttgtgctgcaataataatgtatacaaaacagaaatgcgatgcccacagaaacaata

SEQ ID NO: 4400 - DNA, 261 bp, Zea mays
  misc_feature: Incyte ID No: 700454985H1
  unsure 46, 97, 214: a, t, c, g, or other
cttctccgcgcgcaacaccggcctgccgcgaatgattcttgggaanccctgtacctgactactggatccactaccaagctcttcaagttccaggatncattcctctttgtcgggcaagagctcttgggcctctgtggattatcagcctgattcacaactctctgcaagaattcgagctgcagatgggccaagaaagcgcggctgacgcgattcntggtttgatggtttctgttggtgtttcgggctaacagactctctttt

SEQ ID NO: 4401 - DNA, 259 bp, Zea mays
  misc_feature: Incyte ID No: 700454986H1
acagctcagaatgcaccttttctttctcgttcaatgagtgctgttgggcggttggggaatgaaccatctgccaatgctcctagtttcgttccccgttcacgaacatatcgcaatgccatgatggagaaaagttctggtggtggaagctgtttcacacatcagcaaggttcatcggagcaagcagttgcaccatggcaatcgatgtttacatcgcaacctttcattcggccatcagagaccttgtcttggaaagaggaaa

SEQ ID NO: 4402 - DNA, 262 bp, Zea mays
  misc_feature: Incyte ID No: 700454987H1
  unsure 2, 234: a, t, c, g, or other
cnagcacttctcagcgtgctgttcctcttatctggccattgggcgatgctgttactttctctcccaatggtgtactacaattatacgctataccagcggcgacaacatctggtagatgtgacggagatatttaatcaacttggccgtgagaagaagcggcgcctttttaagatagtcagcctcatagttctcctgttcctgtccttgttctggatgatctggagtgtgttgtcnggaggaggacgagtaggctgacaaagat

SEQ ID NO: 4403 - DNA, 260 bp, Zea mays
  misc_feature: Incyte ID No: 700454988H1
  unsure 251-252: a, t, c, g, or other
tctggtgatccatctttgtatgaatcatcatttcagtcatctacattggttactgatgtagttaattcacatgaaaattcacacttggagttggatgaaaacagcacctttgcaatgagatcaacacttgcctctgagagacacttggaacctagtgacagtattcctgaatacaatgatggaatattgaacaactcaagttcatatcagcctcataattactcttacacagaacaagatgttgaggattnnagtgctga

SEQ ID NO: 4404 - DNA, 261 bp, Zea mays
  misc_feature: Incyte ID No: 700454989H1
  unsure 251: a, t, c, g, or other
ttaacgactacataaaggcggggtcaatagaaggcaaggtggttgaaataggactcacttctacttcattgatcaatccagaaaagctccctgtcatagtacccaactctttgttctccagtcagatgatagttaacagatcacgagctaattggcgagctagtgtgacaaagattcctattcgaattgaggatattgagaaggttcctctgcatcagaggagataaagactatgttaaggtctaatcaanatgtgtcctt

SEQ ID NO: 4405 - DNA, 97 bp, Zea mays
  misc_feature: Incyte ID No: 700454991H1
  unsure 70, 93: a, t, c, g, or other
gtgcacatggaggagctctccaacaaggctctggcaccaagcttgctttcgctgtgcctggatgcggtantgatcgtctcatcagcgacaacnccgc

SEQ ID NO: 4406 - DNA, 263 bp, Zea mays
  misc_feature: Incyte ID No: 700454992H1
  unsure 6, 80, 254: a, t, c, g, or other
ccaganctgcgaacataactcgccaagcatgcctaaggtcgaagaagcttgaagatctgcagccaggagagccgcctgcnaaaccggtgtcacctgctccgccgagggcaggaaagcgtgctcctacacgtgctgctaggggcagaaagggtgccactgggaaaggagtgccccccgcacctaagactagaagaaagcggggtaatattgtcgacttgggaagctgattccagcttgtgaggacctcctaaagngtcaaggga

SEQ ID NO: 4407 - DNA, 267 bp, Zea mays
  misc_feature: Incyte ID No: 700454994H1
  unsure 258: a, t, c, g, or other
aaagcttctttcgtctattccggaattcgctgattttggaaagctttttaagtcatctgcacctgtagaattgactgaagctgagaccgaatactcagtgaatgttgtgaagcatatttttgatcgacatgttgtgctccaatacaactgtaccaatacaattcctgaacaattgcttgaacaggttattgttttggttgatgcttctggaggctgacgaatttttagaagttgcttcaaagcctttagaatcattanccatatgat

SEQ ID NO: 4408 - DNA, 122 bp, Zea mays
  misc_feature: Incyte ID No: 700454995H1
ccacgatttcgtaccaccacgaccacccatctcaccgatctcctgctcatggacgccgacgatccctccgccgccaccgcttcctcctccgacgaaaccttcttcgatgcccttgactcgct

SEQ ID NO: 4409 - DNA, 123 bp, Zea mays
  misc_feature: Incyte ID No: 700454996H1
  unsure 9, 11, 18, 29, 68, 101, 106-107, 111, 116: a, t, c, g, or other
cttcgtaancnttcaaancgacgaatttnagcaactgcacccagagcgcgatccattgccggggaagnagcaacttgttgcgagcctcctctatggcgagntccgnncatngttcnacacaac

SEQ ID NO: 4410 - DNA, 298 bp, Zea mays
  misc_feature: Incyte ID No: 700455001H1
  unsure 189, 251, 293: a, t, c, g, or other
aggccattcaccgtttctcattgttgggaggttctaaagaatgaagccaaatggttacacttggagcagggctcacaaaatattgatgtgctggtgaacaaaggtgtagggttttctccaagatgtcggatttgacactgaagaagatgagtattggaagaggtccgattggaacattggcactgacantcacccaacttgttcaaatagaggaaaaggatatggaaatggaggaagagccatgtatgcangtgtaggtcaaggatggctcgggacagcctgggtcaattccntgcgt

SEQ ID NO: 4411 - DNA, 296 bp, Zea mays
  misc_feature: Incyte ID No: 700455002H1
  unsure 83, 185, 192, 203, 212, 216, 291: a, t, c, g, or other
ccaagttggctaaacggtacattgatcattcgtttgttctgaggctacttgacctctttgattcagaagaccctagggagagngagtactcaagatgatacttcaccgtgtctatggaaagttcatggtcatcggccctatattcggaaagccattaacaacattttccatcagttcatctatgnaaactgnaaaacaccatngaatccccngagntattgggagattttggggaagtatcatccatgggttgcatgcactttaggagagcataaatgtccttgttcggcnttaat

SEQ ID NO: 4412 - DNA, 295 bp, Zea mays
  misc_feature: Incyte ID No: 700455003H1
  unsure 211, 216, 237, 247, 284, 291, 293: a, t, c, g, or other
gtgccacaatatttaaatgacgggagcatcatgaagaggaatggcgatgcttagtcaagttgagttgccagtgtccaagcaaaatactgtcgttgttggtgggaatttgattgtaaatggctcagctggatctggagcagcaaccactgtgctgcgacaccagttgtctcctgtttcctctattgaggttatggccacagctggactaagntctgntaatggtgggcagatgttccncaaatttcancacatctacagcaacttctggactgctggttcttganagatggncnat

SEQ ID NO: 4413 - DNA, 296 bp, Zea mays
  misc_feature: Incyte ID No: 700455004H1
  unsure 200, 229, 238, 253, 276, 279, 288: a, t, c, g, or other
gaggccgtcgccgccgaccccgagctgaaggcgttctgggacgaggtgcgcaacgtgggccacggcgacaagaaggacgagccgtggtggcccgtgctcgacacccgcgacagccttcgcggagaacgctcaccaccatcatgtgggtcactccggccaccactcggcggtcaacttcgggcagtaccacttcggcgganattcccgaaccggcccggaccacattccngaaaaacangcccgttgaagagangcggccgggcgaagagatgaagnagntctgaagcnagcggaga

SEQ ID NO: 4414 - DNA, 303 bp, Zea mays
  misc_feature: Incyte ID No: 700455006H1
  unsure 224, 268-269, 274, 297, 302: a, t, c, g, or other
tgcgtatcatcgttttccatcgctcctactcctatcatccagaaaatctgagcggtattgatggcgcccaaggcggagaagaagccggcggcgaagaaggtggcggaggaggagccctcggagaaggcggcttccggcggagaaagggccccgcggggaagaagcccaaggcggagaagcgggtacttgcgggcaagtccgcctgcaaagagggcggcgacaanaaaggtaggaagaagcgaagaaagaccgtggagaacttacaggnnttacntctcaagttcttaagcaagttcnacccnc

SEQ ID NO: 4415 - DNA, 290 bp, Zea mays
  misc_feature: Incyte ID No: 700455007H1
  unsure 171, 188, 202, 220, 252, 266, 282, 289: a, t, c, g, or other
gccgctcgcgatctagaactagatgacacagctgctttcaaaaacttcaataagtggggcaatattgtgtttcccctaccatttggaagagttctcagtccctccgaaagttttatccatgaactggatgagaagacaagtgctttctctgaaattcacggtatgaacccnaaaggacgcatctgganaatggttgcaggtngtggtgcagtgtctatangcaacactgtggtgatttgggaatgcttcgantaaggaaattaggnggatacagttggactncccaggng

SEQ ID NO: 4416 - DNA, 185 bp, Zea mays
  misc_feature: Incyte ID No: 700455009H1
  unsure 126, 163: a, t, c, g, or other
gaagattacctactttcaggaccgcccagatgttatggcaaaatatacttgccgcattgaagctgataaaactttgtatccggttttattgtccaatgggaatcttattgagcagggagaccttgnagggtggaaagcattacggcactgtgggaggatcccnttcaagaaaacccaagctacct

SEQ ID NO: 4417 - DNA, 294 bp, Zea mays
  misc_feature: Incyte ID No: 700455010H1
  unsure 286: a, t, c, g, or other
gcacagcagcaccggcagcaccaccaaccccagggcagccgcgccgccagccacgacaagcttagcagcccctcgcactcgctagggtatttattggtacaatcgggtgatctgcgtgccgcatcgcgccgggacacgggagacaatggcgttcacgacgctcggcggctgtggggcgcaggcttcagtgcggttggctccccagaatggaatccttggatctaattcgaagccattcgcgggcatcatactcaagaaacctcagcaggttggatccctgccctcngtgcaagg

SEQ ID NO: 4418 - DNA, 146 bp, Zea mays
  misc_feature: Incyte ID No: 700455011H1
ttgagacaagtgcaatgataattacatttgtgttgctcgggaagtatctcgaggtgcttgcaaaagggaagacatcggatgcaattaagaagcttgtagaactggtccctctactgctgttttggttctgaaagaccaaagaaggg

SEQ ID NO: 4419 - DNA, 295 bp, Zea mays
  misc_feature: Incyte ID No: 700455012H1
  unsure 129, 168, 209, 218-219, 226, 234, 238, 242, 248, 269, 271, 286, 292: a, t, c, g, or other
cacagcagcaccggcagcaccaccaaccccagggcagccgcgccgccagccacgacaagcttagcagccccttcgcacttcgctagggtatttattggtacaatcgggtgatctgcgtgccgcatcgcnccgggacacgggagacaatggcgttcacgacgctcgganggctgtggggcgaggctttcatgcggttggcttcccagaantggcatccnntggatcnaaattccnagcnattncggggntcatatcaagaaactcagcangntggatcctgccctcngtgcanggg

SEQ ID NO: 4420 - DNA, 135 bp, Zea mays
  misc_feature: Incyte ID No: 700455013H1
caagtgggaattggatgtacgctgcaaagcttgatggcgaaggtgctgatatgtatgatgcagctgttgcattggctgactgcatgattgaacttggtattgcaatagatgggggaaaagacagtctttccatgg

SEQ ID NO: 4421 - DNA, 290 bp, Zea mays
  misc_feature: Incyte ID No: 700455015H1
  unsure 264: a, t, c, g, or other
ggccgcgacttcgtgctggtggcggccgacacctccgccgtgcagagtattctcgtccacaagaccgacgaggacaaggtgatggtgcttcgactcgcaaaagctgatgggcgcttcaggggagcctggtgatcgggtgcaatttacggagttcatacagaagaacctccacctgtaccagttccggaacaccatcccgctctcaaacggcggcgcggcaaattcaaaggggggaattcgcaaagccttcgcagattccaatantgtcatatatccttgtggtaaggata

SEQ ID NO: 4422 - DNA, 295 bp, Zea mays
  misc_feature: Incyte ID No: 700455016H1
  unsure 7, 107, 194, 204, 243, 254, 256, 260, 278, 288, 292-293: a, t, c, g, or other
gttcaanaagctgacatgtcgtgttagttttactatggatgcatggacatctatacaaaacaaatcgtacttatgtgtcacagcacattggattgatgataattggnacatgcaaaaaaggattatcaattttatgcatgtagaagacagccatggtgggataaaaatgagtgatattttttttgtaatgtgcnccattggaanccttgataagaaaatgttgctccttctttggataatgcngcggaaacaangntgcngttggatataatgtaganaatgccaagnctgnncc

SEQ ID NO: 4423 - DNA, 296 bp, Zea mays
  misc_feature: Incyte ID No: 700455018H1
  unsure 162, 200, 206, 211, 222, 224-225, 232, 240, 243, 264-265, 274, 277, 290: a, t, c, g, or other
tcccaaaggtcaacaaggaaatcttcaaaatgcagagagtgaatgctccagctgggcagatgcagctaaagggcttgattgaggcctatgttgaaaaaacgggcagcgagaaaggtattgcgattttgagggaatgggaggcctatttgccgctctctggcnactggtaccgccccagtgaagaagactcgcctgaggcntgtgcnagagntttgagagagntnnttgccangcagcaancancccaattgtctgcgaatgatnngattcaganacnaggagggggtagntgtttc

SEQ ID NO: 4424 - DNA, 291 bp, Zea mays
  misc_feature: Incyte ID No: 700455020H1
  unsure 236, 240, 258, 264, 272, 278, 284, 286, 289-290: a, t, c, g, or other
gcacagttgctactgcagttgctaatgctaatgcaacagccatggaggctaccaaggagatagaagctgcactaaaggtttcaatgagggcagctcttgggttggatacaaataactccaacgagggccaacttgatgacctaacaatcatgaaggagaccctacgagtgaaagatgaggaattgcaacatttgggtaaggatattcttcccgagatgctacaataaagggaatanccgncaaacttacaggaactgngcgctncagaagcngcttgntctgcnantcnna

SEQ ID NO: 4425 - DNA, 296 bp, Zea mays
  misc_feature: Incyte ID No: 700455021H1
  unsure 6, 74, 167, 173, 196, 203, 219, 228, 238, 246, 250-251, 254, 256,258-261, 266-267, 277, 293: a, t, c, g, or other
ccaganctgcgaacagtaactcgccaagcatgcctaaggttcgaagaagcttgaagatctgcagccaggagagncgcctgcgaaaccggtgtcacctgctccgccgagggcaggaaagcgtgctcctacacgtgctgctaggggcagaaagggtgccactgggaaangagtgncccccgcacctaaggactagaangaagcgnggtaataatgtcgaanttggaaacntgatccagcntgtgaagncctnntanancnnnnaaggnntcgaagttcnggtgctgttcaacccngaa

SEQ ID NO: 4426 - DNA, 112 bp, Zea mays
  misc_feature: Incyte ID No: 700455022H1
  unsure 98, 107, 109-110: a, t, c, g, or other
acgaatttgagcaactgcacccagagcgcgatccattgccggggaagaagcaacttgttgcgagcctcctgctatggcgagctccgaccatgggttcnacacaacanannag

SEQ ID NO: 4427 - DNA, 287 bp, Zea mays
  misc_feature: Incyte ID No: 700455023H1
  unsure 264: a, t, c, g, or other
agacaggaagcccgccgaacatcacaaggctgcgaacctcctagaagctcgaggagatgctctccaagctgttcggcgtggttcgtgaacccgcggaggaatccgctcgcgcgtctccaccggaacgccgtcgcctcccgcctccgcaaatacgggctcagtatgacgactctaacgaccgtaccacgacctagacatcaaggaggcgttgcgcggctgccgcgggaagttgtggacgccgtaacagggcttcaagcggggcanggacttttcatgaacacagtact

SEQ ID NO: 4428 - DNA, 286 bp, Zea mays
  misc_feature: Incyte ID No: 700455024H1
  unsure 124: a, t, c, g, or other
gagaagcgaacaaagcaggcttcgagaacaagggggagggggaggaccaagcgaaagggggaactagagcaagatgggcggcgaactgctgcttgcgctcctcctcgtctctgctgctgccgcncctcaggtacttggagttggcaatggagacaatcacatgagaatcatccaggaggacatcattgagacagtcaacaaccatcccagtgctggtggacagcctcacgtaatcctacttttcaactatacattgcgcatttaaccacaacttggagtgaaccag

SEQ ID NO: 4429 - DNA, 296 bp, Zea mays
  misc_feature: Incyte ID No: 700455025H1
  unsure 81, 191, 203, 261, 277, 279, 292, 295: a, t, c, g, or other
ggagaaagtcacaaaagtctcacctcctcggagaaaggcttatagagaagacaaatctgataggcagagcaactatatganaaaggataatggtcctgagacaagtcgggttgggtataagatgcagcaggcaaagcagctgcaacagcaacaaagaccagcatctgctttcagcctcatcaagggcatcntgaaaaggaaanttccttgtgatgatgtagaaattgatgcaattcttgaggagaaggaggcccccattgnattcacaggaaggagncngagattactatgnggnt

SEQ ID NO: 4430 - DNA, 284 bp, Zea mays
  misc_feature: Incyte ID No: 700455026H1
  unsure 208, 283: a, t, c, g, or other
ccagattatgttcgagactttcaatgttcctgccatgtacgttgcaattcaagcagtgctgtcactctatgccagtggacgtactactggtattgttctcgactctggtgatggtgtgagtcacactgtgcccatttatgaaggatatgcccttccccatgccattcttcgtctggatcttgtggtccggactcaacagactcctcantgaaattctccactgagaggggtaatccttcacaactctgccgagcgagaattgtgagggcatcagggagagctnc

SEQ ID NO: 4431 - DNA, 295 bp, Zea mays
  misc_feature: Incyte ID No: 700455027H1
  unsure 245, 282, 293: a, t, c, g, or other
agaaaagctgtatcaaaattttgtgcgaggcatttgcataaacaagtgcttataaatgatgcaaattcatctggtgatttgccaacctctctccataaagctttcttaagaatggatgagatgatgaaagggcagaggggttggagagaactaactgagctgggagataagggaaacaaaatctcaggtatgatagacgacataatatggccctcccaaggggtggtgatttcagataagataanggaagattgggataaccgaggaggtccaattccgacnttcctggaacnac

SEQ ID NO: 4432 - DNA, 300 bp, Zea mays
  misc_feature: Incyte ID No: 700455029H1
  unsure 4, 6, 14, 85, 129, 142, 146, 153, 200, 212, 238, 240, 242, 258, 280: a, t, c, g, or other
ttgngnatctgganaccccaaagcttcccgagttcgctttcgggggttgggcatttctgccctgcttgcgttctttcgggtttgncaaagataaagataaaaagcaattccatgggaacggggctttcncccccaaagaagncgtncgggcgngtgggcgggccccttaaacaatttcccgggccgggggattccccacncccccgcaaggncgggaagccaagggcgggcgggcaangnanggagggccgccgaacngcaagcggaaccgcagttaatncccgttaatggtgaactggg

SEQ ID NO: 4433 - DNA, 301 bp, Zea mays
  misc_feature: Incyte ID No: 700455030H1
  unsure 272: a, t, c, g, or other
cgtcgctttccagccgccgccgcgtccgcctcgccaagcgcagcagccgccgcagcacatcgctctcttgatctcagccatggcggaggtggagcagcaacaggacacgccgaagctcttcaaccgctggaccttcgatgatgtccaggtgaacgacatctcgctgaaacgactaccttcgctgtgaacgcggacgaagcacgcgatgtactgcccgcaaaaccgcggggcgctactccaagaaagcggttccgaaaggcgcaatgcccgancgttgaacgccttacaaactcctcatgtg

SEQ ID NO: 4434 - DNA, 291 bp, Zea mays
  misc_feature: Incyte ID No: 700455031H1
  unsure 40, 215, 262, 272, 289: a, t, c, g, or other
acggaaaacacggggaagctaataaagaccctctccgtcnccttcgctgggaacagtgacatgggccctccagtatgtattcgaggggtgcaccaagctgcagaagcttgaggtcagagatagccctttcagtgacaggggttgctctcaggactggactattgtacaacatgaaggttcttgtggatgaactctgcaagctgacgatgaggggntgtagaggtgtactcagcagatgcagaatctggtgggcgaattatcnaggaccatcngaagatgaaggggaggntg

SEQ ID NO: 4435 - DNA, 294 bp, Zea mays
  misc_feature: Incyte ID No: 700455035H1
  unsure 88-89, 92, 181, 216, 224, 233, 236, 240, 247, 250, 261, 263, 266, 274: a, t, c, g, or other
gaccgacaaagcgcttgtccacaaaagttggaccgtggggtgggagcggcgggtctccgatggacatcactgcagagccccagcgtcnnaanagcatcaccgttgctactgggcatcgccgtgaccttcgattgcgttctcctacgtcgactccgccggccaaacccaatctgctggtcgnggggcggttccggtggagaaactgaagccggtganccagctcngcggattcngangttntcaacgnacntgtcgggacgntngcnaagtcganggctcaacgtcaaaaacttt

SEQ ID NO: 4436 - DNA, 282 bp, Zea mays
  misc_feature: Incyte ID No: 700455038H1
  unsure 241, 248, 254, 262: a, t, c, g, or other
ttggatctgaacccaagctccgagtcgctttcggggtgggcattctcctcttcgtcttcggttgcaagaaagaaaaagcatcatggacggcttccccaagagcgtcggcggtggcggccctaacattccggcgggatcccaccccgcaggcgggagcaggcggcggcaggaggaggcgcgacgcagcggacgcagtatccgtatgtgactggtaattcagtcattgcctgaaatacaagantgtgtancatggntgtgacantgagctcttatggatcactt

SEQ ID NO: 4437 - DNA, 293 bp, Zea mays
  misc_feature: Incyte ID No: 700455039H1
  unsure 24, 110, 233, 248, 261, 270, 272, 274, 286: a, t, c, g, or other
ggcgcagatcatcgatggcaaggncatcgccgccgacgtccgccgcgaggtcgccgccgatgtggccgcgctcttcgtcagcccacggactcgtgccggggatggccgtngtcatcgtggggagcaggaaggactcgcagacgtacgtgaacatgaagcgcaaggcgtgcgccgaggtcggcatctgctccatcgacgttcgacctcccggaggacatttccgaagaaccggntcgatcgcgaaggtnatcgcttcaaggntgacccccnantnaacgggatcttngtccact

SEQ ID NO: 4438 - DNA, 280 bp, Zea mays
  misc_feature: Incyte ID No: 700455043H1
  unsure 240: a, t, c, g, or other
gtgtacacaacttctttgttacttttatcgaggtcttgcgtgacaggcctgctggtcatgattgggagcttgaacctggagtcacatgtggtgactatttgtttgggatgttgcagggaacacgttctgctctttatgcaaatgaccgtgaatctatctctgttactgtgcaagaggtaactcctagagctgttggagcactggttgcacttatgaacgtgctgtggggcttaatgcttnttggtaaatatcatgctatcatcacctggtgtgaggcggg

SEQ ID NO: 4439 - DNA, 281 bp, Zea mays
  misc_feature: Incyte ID No: 700455044H1
  unsure 252, 276: a, t, c, g, or other
tcgctgccgaggagccctggtatggtatcgagcaggagtacaccctccttcagaaggacaccaactggcccctcgggtggcctattggcggcttccctgggccctcagggtccttactactgtggaatcggcgcggagaaatcgttcgggcgtgacatagtcgacgcccactacaaggcctgcctgtacgcaggcatcaacatcagtggcatcaacggggaggtcatgccgggcatggagttcaagtcggangtcgtcgcatctcttcgggcgacnagtgt

SEQ ID NO: 4440 - DNA, 283 bp, Zea mays
  misc_feature: Incyte ID No: 700455045H1
ggctcctatctggtataggacggagctgagcttctagcaacgtacagtgtatccgccatgagtcctttcggggcggtgatcacgccagaaaccctcaagtacatgtccaagtaccagggacgtgagatcacgcaggtggactgcgcacgggaggcgatgaggctgatccacgcggaagacaagaacctcaaggccgaggactcagcgtgggagctgaagaagagttcggcaacggcgtgacaccatgtcctcgtctaaacgcaacggggcagctgagcctgtg

SEQ ID NO: 4441 - DNA, 291 bp, Zea mays
  misc_feature: Incyte ID No: 700455046H1
  unsure 11: a, t, c, g, or other
aagagaaaganaagttgattgacttggactacttaactggaaacccactaccaaatgatattttgctatatgctgtacctgtgtgtgccccttacaacgcattgcagacatacaaatatcgtgtaaagattaccccaggcactgcaaagaaagggaaagctgcaaaaaccgcgatgagcttgttcctgcacacacctgatgctaccaaccgtgagaaggagctcatgaaggcatgcacagaccctgagctggtggtgcaatcgtcgggaatgccaagatcatagcgcctgg

SEQ ID NO: 4442 - DNA, 289 bp, Zea mays
  misc_feature: Incyte ID No: 700455048H1
  unsure 272: a, t, c, g, or other
gagagacgaaggaagagagcctaggactgactcactgacccgaacccgttcccggcgggacttcctctcgaatcgtcccagttcgagaccctagttgccccacgaaccgaggatccaagatgagtttcctgttcgggaagaggaagacgcccgccgagctgttaagagaaaacaagagaatgctagatcgatccatcagggaaattgagcgagagagacaagattgcaggcccaggagaaaaagctcatcatgagatcaagaaaacactaangaaggccagatgggagt

SEQ ID NO: 4443 - DNA, 291 bp, Zea mays
  misc_feature: Incyte ID No: 700455049H1
  unsure 5, 46, 48, 175, 206, 228, 254, 260, 266-267, 269-271, 273: a, t, c, g, or other
ctgcnttggcattccgcctgctggacttcctcgtgctgtgtctctntntgttagctctcgctctcagacgactggtccgccgccgcttggtgctgaggctttcgttggtctcttcggcggcgacgagcacccaccagcagttctgtaaaaatgggtgatggtgaagacatccagnctcttgtctgcgacaatggcaccggaatggncaaggctggttttgctggggangatgcaccaagggcgttttccctagnaatgtnggccgnncnnngnaaatggtgtcaatgtagg

SEQ ID NO: 4444 - DNA, 161 bp, Zea mays
  misc_feature: Incyte ID No: 700455050H1
  unsure 134, 151, 153, 156, 159: a, t, c, g, or other
gtgtacacaacttctttgttacttttatcgaggtctgcgtgacaggcctgctggtcatgattgggagcttgaacctggagtcacatgtggtgactatttgtttgggatgttgcagggaacacttctggctcttnatgccaatgacccgtgnanctngcncc

SEQ ID NO: 4445 - DNA, 289 bp, Zea mays
  misc_feature: Incyte ID No: 700455052H1
  unsure 225, 227, 237, 253, 270, 280, 282-283, 285: a, t, c, g, or other
tgactcttatgtcttatctgagtcgagcctgtttgtctacccgtacaagattgtgatcaagacctgtggaactacaaagctatctgctcgctattccgaggatccttgaacttggctgaagagctcctgttgccactcgctgcagttaaatactcccgtggaacgttcatattccctgaagcacaaccttccccaacacaagaacttcgctgacgagggttgccntnctgaatcgcntctcggtgggctcaangtcggtgggaaagctantgtgattgtnanncngcga

SEQ ID NO: 4446 - DNA, 270 bp, Zea mays
  misc_feature: Incyte ID No: 700455053H1
  unsure 35, 45, 56, 89, 96, 99, 138, 143, 200, 219, 236, 238, 241-242, 263: a, t, c, g, or other
cttccagtcgatctcctcgctcggctgttgcctcncaaagccgcnccttagaaagngattcctcccctcctctctccaataaccctagnctcctcngcngccggcgacgaatccggcgttttgagtttctgttgccancgtancatggtccaatgttcaatagattttcggggaagcccaaggaagcaaggccaactccnatgctttggcaatctgggncagtaaatgagatccgngnatnnggaggaggaaggaaaagtgcnggagaaa

SEQ ID NO: 4447 - DNA, 141 bp, Zea mays
  misc_feature: Incyte ID No: 700455054H1
  unsure 8, 12, 25, 34, 41, 43, 46-47, 53, 75, 84, 90, 100, 106, 110: a, t, c, g, or other
ttcgaacncgcngccgtcaccgtcntcgctcgcnctctccncncgnntcggancgagagtaggggcgtgtcggcngtgaaagcnactgcntcagccatgngcgganccangagcattcggagaggagagaggaggccttcc

SEQ ID NO: 4448 - DNA, 284 bp, Zea mays
  misc_feature: Incyte ID No: 700455055H1
  unsure 46, 106, 234, 264: a, t, c, g, or other
cacggttccactccaactctccgatctccaggaatccgcggctgangcgccggcgatggcggctcccatggtcgacgccgaatacctgcgccaggtcgacagggcncgccgccacctccgcgccctcatctccaacaagggatgcgccccgatcatgctccgcctcgcatggcatgatgctgggaattatgacctgaagacaaaaatggtggtgcaaatgttcgattagatatnaagaagataccacccatgggttaaaatgtngttaaagatgctatcgatct

SEQ ID NO: 4449 - DNA, 285 bp, Zea mays
  misc_feature: Incyte ID No: 700455056H1
  unsure 170: a, t, c, g, or other
gtaagaagcttgtagggaagctaacaccaggagctgaggctatctccctcatcaagggcatggaggtcaagatggaagggccgtgcatgatatccaagttaatcgcggatacacttggaatcaattgctgtgtgctcatgggtgctaacattgcaaacgagattgctgtncgaagagttcagtgaagcaacaattgggtatgggaaagataaggaagtggcaaatcgatgggctaaactttttaccacaccctacttccaattccggcgcagaagatattgaagg

SEQ ID NO: 4450 - DNA, 281 bp, Zea mays
  misc_feature: Incyte ID No: 700455059H1
aattgactgaagctgagactgaatactcagttaatgttgtgaagcatatttttgatggacatgttgtgctccaatacaactgtaccaatacaattcctgaacaattgcttgaacaggttactgtttttgttgatgcttctgaggctgatgaattttagaagttgcttcgaagcctttagaatcataccatatgattctcctgggcagaccttgtcgctttgagaaagccagaaggtgtcattgctactggcaagttctccaatatcctggaattcatgtta

SEQ ID NO: 4451 - DNA, 282 bp, Zea mays
  misc_feature: Incyte ID No: 700455060H1
  unsure 221, 241, 274, 277, 279: a, t, c, g, or other
ggatcgtcgcaatctgggttcgggaggagctggttctccaattcacaaatttgagggccataaagctgctgttctttgtgttcagtggtcacctgacagagcatctgtttttggaagttctgcagaagatggtttcttaaatgtttgggaccatgagaaggttgggaagaagaaaaattctaatgtcccagctgggctttctttcagcagctggtccatanggataaggtcgtagacttcnactggattcgtcagatccttggacaatgtcagnggncncag

SEQ ID NO: 4452 - DNA, 284 bp, Zea mays
  misc_feature: Incyte ID No: 700455061H1
  unsure 222: a, t, c, g, or other
gggatcgtcgcaatctgggttcgggaggagctggttctccaattcacaaatttgagggccataaagctgctgttctttgtgttcagtggtcacctgacagagcatctgtttttggaagttctgcagaagatggtttcttaaatgtttgggaccatgagaaggttgggaagaagagaaattctaatgtcccagctgggcttttcttcagcatgctggtcatanggataagatcgtagacttccactggaattcgtcagatccttggacattgtcagtgtctcaga

SEQ ID NO: 4453 - DNA, 284 bp, Zea mays
  misc_feature: Incyte ID No: 700455062H1
  unsure 176, 235: a, t, c, g, or other
cggcggcgaggaggctctaggggcgccagccgaggtggtggtccgtggggactgggaggggagggcggcgatggaggagaaggcgtcgtcgccgctggttccgccgccgtcggagatcgacctcgaggcgggcggcggcggggagcagctccagtgccggatctgcctcgagaccnacgggagggattcatcgcgccctgcaagtgcaaggggacgtccaagtacgtgcaccgcnactgccttcgaccactggaaggcgtgaaagaaggttttgcatttcccat

SEQ ID NO: 4454 - DNA, 287 bp, Zea mays
  misc_feature: Incyte ID No: 700455065H1
  unsure 2, 206, 239, 257, 268, 270: a, t, c, g, or other
angcaacatctgggctgatgatcttgctacatctctcagcactctccagtctcttgaggctgttgttgggaaggacaagcttgtcgtatcaacttcctgctcgctcatgcacaccgctgtggatcttgtgaacgagactaagcttgacagcgagattaagtcttggcttgcttttgctgcccagaaggttgttgaggtgatgctcntgctaaggcattggctggtcaaaaggatgaggntacttcgcagcaaatgcngcagctcaggncncgaggaaatcctcaccc

SEQ ID NO: 4455 - DNA, 284 bp, Zea mays
  misc_feature: Incyte ID No: 700455066H1
  unsure 43, 183, 199, 212-213, 215, 226, 258, 263, 271, 278: a, t, c, g, or other
agaagaacgaatgaaccaggtttccaaaaggaatgaaaggaanaaaaaactctctgctttctggtctctcggagatggagcaccagttcatcgagtctcgcgagtagcgtatttggtagcgagttatcgcgctgtaaaattacactgtgcttgcgcgctgaataattttgctggctttgtccntttgggtttttgaacnttgtcgccggagnnangtagccaggantgtcgtcttgtaaccgcgcggtctctctctcnccccngggacttngggaaanctttaa

SEQ ID NO: 4456 - DNA, 282 bp, Zea mays
  misc_feature: Incyte ID No: 700455068H1
  unsure 200, 234, 241, 252, 269, 279-280: a, t, c, g, or other
attggcgttggccgaagaagaggagaagcgaacaagcaggcttcgagaacaagggggagggggaggaccaagcgaaagggggaactagagcaagatgggcggcgaactgctgcttgcgctcctcctcgtctctgctgctgccgcccctcaggtacttggaattggcaatggagacaatcacatgagaatctccaggaggncatcattgagacagtcaacgaccatcccagtgcngggtggncagcctcacgnaatccttattttccaanataccatgcnnaa

SEQ ID NO: 4457 - DNA, 194 bp, Zea mays
  misc_feature: Incyte ID No: 700455071H1
  unsure 34, 125, 144: a, t, c, g, or other
acgccaagctcgtggtgaagttttcgagatgaangttatcgagaagatcctggaggcggcgggggatggccggacggcgttctcgttcgagtacttccctcccaagacggaggagggggtcgagnacctgttcgagcggatggnacccgcatggtggcgcacggcccctccttcttcgacatcacctggggcgc

SEQ ID NO: 4458 - DNA, 75 bp, Zea mays
  misc_feature: Incyte ID No: 700455073H1
  unsure 3, 11, 34, 41, 71: a, t, c, g, or other
ggnacgaggtnccattacttctcaaaatagctgnggcctgnagcttctttcattgtttcaaagcattacancata

SEQ ID NO: 4459 - DNA, 282 bp, Zea mays
  misc_feature: Incyte ID No: 700455075H1
tgctcgaagttcttgtagcagttgaactttgctaattgaagctgcaaaaggaacttcgatagatcagcattacgaggcacaacaacaagaatgatcagatgctcgacaaaggcatggtggtgatgggagctcctcaaggccaacaaaatggtttcaaggaggcagccaactcggtggagttcctaggttctctactatgtgtaatctcatatcaagattaatgagtatcgtgatcgtataattttgaatcctatcaacccatatggcaaggcaaagaaaatg

SEQ ID NO: 4460 - DNA, 277 bp, Zea mays
  misc_feature: Incyte ID No: 700455077H1
  unsure 82, 250: a, t, c, g, or other
gaaaccttgtaaaggtagctgacaggaggtttggtaggaccaacttgctgatatatgggccaacttggtcagagaaaaagangaaaagatgatttctgaagggggggttcaggtgtaatgataatcacggttgggaacggttaaggtttcaagatttgcacaggggatacttggcctagtgtaaggcataagaaggtggttgatctggttcactgggcctatcctgattaacttgcacagcacagagagncgcattcgcttccttgtggtcaagatc

SEQ ID NO: 4461 - DNA, 284 bp, Zea mays
  misc_feature: Incyte ID No: 700455078H1
  unsure 35, 126, 130, 273, 275, 280-281: a, t, c, g, or other
gattagagaggtgttttatactgcacatcggtgangcctaataagaaagtagaatagacgtaaaccattgttttcatcatcctttaagacagggatttcagactcaagaaccaggcagctacctanttanatgagtcaagtgggccctaatgtaagacaatgtgatgggtaaggattgattctgagggaacagggagcaggcatgccctctctaacaagaggccgtcattctgctgtactgaaatgtgggccccatgttgctgggcgttccangnaacannctg

SEQ ID NO: 4462 - DNA, 139 bp, Zea mays
  misc_feature: Incyte ID No: 700455080H1
cgatgagtacgtataatatatcattagcataaacgagatgatgtgatgatcgatatacttccttgttaacatcattagctggcaactgaaaaatgttgccatgaaactatattatccagcagcggctggctttgtgtac

SEQ ID NO: 4463 - DNA, 156 bp, Zea mays
  misc_feature: Incyte ID No: 700455081H1
  unsure 79, 100, 143, 151: a, t, c, g, or other
cgaaagggaatcaagctattataaacacacgcaccttgcggatcatgtaactgcaggtctgcaaaaaaagaaaaaaggncattatacagtcatagtcacnggcagagaaatctgtacacgaaataagtaagtaggttatgggngaaatacnaaaaa

SEQ ID NO: 4464 - DNA, 282 bp, Zea mays
  misc_feature: Incyte ID No: 700455082H1
  unsure 4, 43, 67, 73, 112, 138, 176, 193-194, 234, 241, 258, 269: a, t, c, g, or other
agangtcctcctccttcggggacgatgtcgtcgtcgtcgctgnctacaggacgccgatatgcaaggncaagcnaggaggcttcaaggacacctacccagaggacctcctcantgttgttctcaaggctgttctggacnacactagaatcaatccagctgacatcggtgacatcggngttgggacgtgctcggnnctggttcccagcgtgcaaacgattgcaagatggctgcgtngtttgcngggatccctgaaaacgntcctgtaagantgtcaaccgccag

SEQ ID NO: 4465 - DNA, 277 bp, Zea mays
  misc_feature: Incyte ID No: 700455083H1
  unsure 168, 185, 196, 199, 230-231, 234, 239, 241, 267: a, t, c, g, or other
aattgactgaagctgagactgaatactcagttaatgttgtgaagcatatttttgatggacatgttgtgctccaatacaactgtaccaatacaattcctgaacaattgcttgaacaggttactgtttttgttgatgccttctgagggctgatgaatttttagaagtgcntcgaagccttaggatcnataccatatgntcncctggggcagaccttggtcgcctttgagganncangaagngncatgctacgggcagtctccaatatcngaaaatcatg

SEQ ID NO: 4466 - DNA, 279 bp, Zea mays
  misc_feature: Incyte ID No: 700455084H1
  unsure 33, 45, 69, 167, 218, 244, 247, 255, 267: a, t, c, g, or other
gcgtggctaacgttgcgcgacgggttgggtganctggacatcctngcgacgactgcactcgcgctttgncccgctgctgtcggtccgcttgggttcatcggatcaggtgaacgtggcggaccgccgtctcgcacacgccttgctcgtggagcgtgggcgccgctgtngctgaacgcttcgccgctgctggtgtccaccgagaagttcggggcttcggntcttcagcatacacgtgtccaactanggnccacgctngaatgttctcgncgcaactcgggg

SEQ ID NO: 4467 - DNA, 280 bp, Zea mays
  misc_feature: Incyte ID No: 700455085H1
  unsure 5-6, 138, 159, 162, 214, 225, 236, 246, 248, 261-262, 270-271, 279: a, t, c, g, or other
gcaannactccacactgctgtgcagaacgagagccacaccatcagtagttagagcgaccaatagatgagttcctccccgtcctttggtctcctggctgtagcagcattactcctagcactgagcttagcacaacatgngctccctcgccgcaaccgtcngcnccagggtcatcgtcgtcggcggcggcatgtttgggatctcggcggcgaagangctgtcggagncgggaataacngactgctgantntggaagcgacggnncccatcgnnggcggatna

SEQ ID NO: 4468 - DNA, 280 bp, Zea mays
  misc_feature: Incyte ID No: 700455086H1
  unsure 76, 142, 186, 193, 200, 204: a, t, c, g, or other
cggtagcaggtagagccagccagtctagcttagccaccacactagtgtgatggcgaccaccggcggcggcaaggcngcactggtgctggggcggcttctgcttctgctgtgcgtgctcggccatggagctggcgcagcggtnacaacgccatctggagcttcggcgactccatctccgacaccggnaacctcngcgtggnggtnggtgccttcctgggctcaacaacggggcagccgccctacgggagaccttcttcggcggcccaacggacgtgctccg

SEQ ID NO: 4469 - DNA, 77 bp, Zea mays
  misc_feature: Incyte ID No: 700455088H1
  unsure 2, 49, 56, 64, 67-68, 70, 72, 75: a, t, c, g, or other
cnattaccagccgctacaaaaacacaagtacacagaccagtgacatcanaaagctnccacacanccnncncncangg

SEQ ID NO: 4470 - DNA, 277 bp, Zea mays
  misc_feature: Incyte ID No: 700455092H1
  unsure 23-24, 99, 125, 147, 153, 181, 203, 206, 210, 212, 225, 227, 248, 260,273: a, t, c, g, or other
atcatattttatatcttcttcgnnaccacacttatccccaccttggctatcatcacccgatgaggcaaccagccagaacgcctgaacgcaggcacatanttcctattctacaccctagtaggctnccttcccctagtcatcgcactnatttanactcacaacagctaggctcataaacatnctgtactcacctcaatgcccangantatnanactcctgaggcancnattgaatatgactagcctacncaatggttttanagtaaagataccncttt

SEQ ID NO: 4471 - DNA, 280 bp, Zea mays
  misc_feature: Incyte ID No: 700455093H1
  unsure 107, 249, 278: a, t, c, g, or other
gaggccgtcgccgccgaccccgagctgaaggcgttctgggacgaggtgcgcaacgtgggccacggcgacaagaaggacgagccgtggtggcccgtgctcgacacccncgacagcctcgcggagacgctcaccaccatcatgtgggtcacctccggccaccactcggcggtcaacttcgggcagtaccacttcggcggatacttcccgaaccgcccgaccaccatccggaagagcatgcccgtggaggangaggcgggcgggacgaagagatgaagaantc

SEQ ID NO: 4472 - DNA, 281 bp, Zea mays
  misc_feature: Incyte ID No: 700455095H1
  unsure 25, 188, 191, 253: a, t, c, g, or other
cgcgaggatgctggaggacgtcgtngctgtcacgcttgacgttagggcctccgatgcttgacgttagggcctctcgcttgaagaggaacacaaacagagctcatgttttttattttgctctgcattatctactgcttctctgtgggggcgttatttacagtatgtggcctgtttgttgtgttgttccntgnggaagggcgggcgggccgaagtgtttaagaaaatgttgttgtcaacatcaacctcctggaanggccagaacgcaggcagcgctcaactcc

SEQ ID NO: 4473 - DNA, 283 bp, Zea mays
  misc_feature: Incyte ID No: 700455096H1
  unsure 27, 31, 41, 248, 273, 279: a, t, c, g, or other
tggacccgcagccgccaccgatttgcngggnggcgtggganggctgcagcgtcctcctcgacatcaatgacggcgaccgcctagccttcttccgcctcacccccggcgcgacggtgaagattgggaacaagacttgctcactgaagccgctcgtgggacgcccctttggctccctattccgcctcggcgccggcggactcgttccctgcgccgccgcggacgccacatctcgtgatcataacacgccngatgatgccaatgggacaaacgcanggtganacca

SEQ ID NO: 4474 - DNA, 284 bp, Zea mays
  misc_feature: Incyte ID No: 700455101H1
gtcttccttcccgcggtctctccgccgcctcccagatccggcggccatggcaaggaacccgggctgcaccgtcttcataggtaggtcgtgttgtagacctacacatacctcgtgacaaggaaactagccgaccaaaaggctatgcttttgctgagtatgaaacagaggagattgcccaatatgctgttaagctattttcctggtcttgttcgacttcataattaaaacgcttagatttgcgatctctgggcaagacaaaccctcattaaatggcatatcctgta

SEQ ID NO: 4475 - DNA, 278 bp, Zea mays
  misc_feature: Incyte ID No: 700455102H1
  unsure 276: a, t, c, g, or other
attaaaggaggctgagaaagagcatcagaaggagtcagaaaggatagagaaggaacttgctgaaatggaggaaatgaggaaaaagatcagtacaatgacagcagatgattactttgagaagtaccctgaactcaggaagaagtttgacgatgaaatccgtaacgataactggggatattgaagagattggagagaactcttatgatgccatttccatgtccgtgaagaccaataattttcctgtgcctgattgggtggtttccatagcatgtgcangg

SEQ ID NO: 4476 - DNA, 277 bp, Zea mays
  misc_feature: Incyte ID No: 700455103H1
  unsure 251, 273: a, t, c, g, or other
ggcttttcatgagtaaaaccaaccgaccaccaatctccatgcgccgccttgtcaagtttatggaaggaaaggagaagaacattgctgtcattgttggcacagttcacagatgacaaaaggatccaggaggttccagcaatgaaggttactgccctgaggttcacggagacagcaagggccaggattgtccaatgctggtggcgagtgctcacatttgaccagcttgctcttcgtgctccattggcgagaanaggtctcttgaggggccccaanaatc

SEQ ID NO: 4477 - DNA, 277 bp, Zea mays
  misc_feature: Incyte ID No: 700455104H1
ctgatgacgaggacaaacgatgcaagtggtggtgggaagcttccccggaagcgcttctatcgcgccagggcacacagcaacccgctcagcgactcgcacttcccagtcccaatatcacctgaagaggtcgatctctcacagcactacccgcggtacttccctgctgacaagggcagcgacggtgaggaggctgcagcgccacaacagatccgcttcgccgatgtgggttgcggatttggcggtttgcttgtagggctctcgcctctcttcccagata

SEQ ID NO: 4478 - DNA, 275 bp, Zea mays
  misc_feature: Incyte ID No: 700455106H1
  unsure 36, 228, 231, 234, 259: a, t, c, g, or other
gcatcttgcctgcttatatgtgataatatggttgcnattttttcatcattcgtgaatagaatgttcacatgagctgaagtgtacaattaatctagctaaggagttatatctttcttccttttggatttgtacttgctaaatattagttaatctagatggctcgtgtatgatctttccccctcttgtagttgtggagtgcaaggacggaacgatctcagttgcttcacnatngcnggtcaccaggaagctgtgcaaaacngggaccacaattttta

SEQ ID NO: 4479 - DNA, 279 bp, Zea mays
  misc_feature: Incyte ID No: 700455108H1
  unsure 73-90, 120: a, t, c, g, or other
cctcaatttccacaaacgcaagccccaatctcgccgtcaccacccccaatccagcaaacgcaaaccccatctnnnnnnnnnnnnnnnnnngatgtctcgccgctatgacagccgcacgangatcttctcgccggaggggcgtctctaccaggtggagtacgcgatggaggcgatcggcaacgcgggttcagccctcgggatcctagcggccgacggcgtggtcctcgtcggcgagaagaaggtgacctccaagctcctccagacctcgcgctccgccga

SEQ ID NO: 4480 - DNA, 279 bp, Zea mays
  misc_feature: Incyte ID No: 700455109H1
gttttatgcgggtgttgttgaatcattcgatgcctcgtcaaagaagcacaaggtttcgtatgatgatggtgatgttgaggtactagctcttaagaaggaaagatgggagttcattgctgaggaacaaggcgctgatcctgatgtggcatctaatatgccacgtggcaggaaagctaaagggagctcggttcaacaaatggagggaaaaacaggaacacctcaaagtgatgttaagaattctcccaagaagagagggcgcccaaaaggtgtgcgctccag

SEQ ID NO: 4481 - DNA, 277 bp, Zea mays
  misc_feature: Incyte ID No: 700455111H1
  unsure 31, 226: a, t, c, g, or other
caagggcaccaatgaaaagacttggcaaganttccacctttttgagccttcaaaacagaacatgttccaaacttaccaccaaagaaatctgcaaagtggtcaaatggatgaacaagagccagcaaattctatctggtctagcagttaccatgtgtgatttggtaacttttaccaggatgattgctggagtttctggggacagactattggattaagtggcacgacncgatctattgagcttagcccatactgcagcattagtgttaatttcttttga

SEQ ID NO: 4482 - DNA, 278 bp, Zea mays
  misc_feature: Incyte ID No: 700455114H1
ggccaggtctccctctccccggctctccgccttcctcttccagtccccgcgcgcgagatcgccgccccgtgtgggccctagatcccgatggcctcgcgccgccgcaccctgctcaaggtcatcatcctcggcgatagtggggttgggaagacttccttgatgaaccaatatgtgaacaagaagttcagcaatcagtacaaggctacgatcggcgcggatttcctcaccaaggaggtgcagttcgaggacaggctcttcattctgcaaatatgggacat

SEQ ID NO: 4483 - DNA, 276 bp, Zea mays
  misc_feature: Incyte ID No: 700455115H1
gccgcgccgctctccgtcatgaaaatggtgatccagacgaagagcgtggagtacatgccgctgttcctgtcactggcttccctggtgaacggcatctgctggaccgcctacgcgctcatccgcttcgacctctacatcaccatccccaacgggctgggcgtgctgttcgcgctggcgcagtgctcctgtacgccatctactacaagaacacccagaagatcgtggaggcacgcaagcgcaaggcgggccaggtcgccatgaggaggtggtcgtcga

SEQ ID NO: 4484 - DNA, 277 bp, Zea mays
  misc_feature: Incyte ID No: 700455117H1
  unsure 2, 63, 118, 122, 186, 199, 263, 267, 276: a, t, c, g, or other
gntcctctcttcctttctctctcgccgcacgcaggcagttcgagagggcgtgcgttgctcgangggcggtaaatggcagcggcgacgacgaggggcagggccgacggtgacgccggcnccgncgcggtggaggatgcggaagccgtggccaacgacgtccacgcgtccatcaacaacatcacggcncggcgaaatctcnggtactgtcgtgcgggacaggcaaccccatcgacgactgctggcgctgcgactcggactgggcnaacnaccggaacnc

SEQ ID NO: 4485 - DNA, 275 bp, Zea mays
  misc_feature: Incyte ID No: 700455119H1
  unsure 30, 85, 98, 104, 133, 157, 270: a, t, c, g, or other
ggtggacctctcggtgacgcggcgcgaggncctagtcgagcaggtgaggcacgcggccgggacggtgggcttcttctggctggtnaaccacggcgtgncggagnagctgatgggcggcatgctccgcggggtncgccagttcaacgagggctccgtngaggcgaagaggcgctctactccagggacctggctcgcaacctgcgcttcgcctccaacttcgactcttcaaggccgctgcggccgactggcgcgaacacgctcttctgcgangtggc

SEQ ID NO: 4486 - DNA, 213 bp, Zea mays
  misc_feature: Incyte ID No: 700455120H1
  unsure 188, 192, 201, 211-212: a, t, c, g, or other
cttatttacaacagaaaggtttcccagaagttgctctacactttgtgaaggatgagaagaccagatttaacttagctcttgagagtggaaacattcaaattgcagttgcttctgcgaaggagattgatgacaaggatcatggtacaagttgggaattgaggccctgaggcagggaaatgttggtatantggnatatgcttnccaacgaacnnt

SEQ ID NO: 4487 - DNA, 275 bp, Zea mays
  misc_feature: Incyte ID No: 700455122H1
  unsure 145, 207, 224-225, 236, 246, 251, 253, 269, 273: a, t, c, g, or other
ggcggttcatctgttccccttttgccaaagcactatgtgatgatgtgttgatggactatgatgcactgaaggctgtgcaatctggattgggtaccgcagctgttatcgtgatggacaaatctacggatgtcgttgacgcgattgntaggctgtcctacttctacaagcatgagagttgtgggcagtgcacgccttgccgagagggcnacaccctggctctggcnnatcatggagangctcaaggtnggtgncncgaactggaggacatngacntc

SEQ ID NO: 4488 - DNA, 275 bp, Zea mays
  misc_feature: Incyte ID No: 700455123H1
  unsure 2, 37, 45-46, 50, 75-98, 118, 208, 217, 224, 235, 257, 271: a, t, c, g, or other
gnttctgcatctggaaactgccttcatcttgaaaganaagctccnngtcncttctaccagccacccagccccaannnnnnnnnnnnnnnnnnnnnnnnttccgcactggctggcctcntcggtgcggaagagggacaagcatttcatcttgggaagtgccccaatcctccggtgcaggagaattttgacgtgaataagtatctacggnagatggtangaaatgngaagatcccancaacctttcacatggacgctgnctccagccaatcantcat

SEQ ID NO: 4489 - DNA, 276 bp, Zea mays
  misc_feature: Incyte ID No: 700455126H1
  unsure 7, 20, 26-28, 30, 34, 38, 44, 46, 50, 53, 57, 77, 108, 154, 189, 196,217, 224, 228, 235, 242, 258, 270: a, t, c, g, or other
tcaagcngggctctgacaangacttnnnanaganaganagtgcngnaagngangaanggggcaagaagtccctgagnatgcaacgagttcttgaagccagctgaaggngagaggtactataaccctagtggccgtggccgtggtacgggccgtngggggttccgtggtggttacaacggcggttatcgnggaccanctgctgctccagcgatcgaanaccaggntcanttccctnccctggnctaagcacagctcgtnttctcgctcaanattgtg

SEQ ID NO: 4490 - DNA, 276 bp, Zea mays
  misc_feature: Incyte ID No: 700455127H1
  unsure 64-90: a, t, c, g, or other
gttgtgctctctctctctattcgttccccgcctcaccccgagccagccgtctcgctagggtttnnnnnnnnnnnnnnnnnnnnnnnnnnntatgcctcgccgcagctcaggaaggtctgccccacgcccagctacccgtgctgctccagtgaggaacccgccacagccagcacgccaggctcctcctccagctcctgttcgagatggtggtggctccatgtttggaggaattgggtccaccattgctcaaggtatggcgtttggcacgggtagtgc

SEQ ID NO: 4491 - DNA, 273 bp, Zea mays
  misc_feature: Incyte ID No: 700455129H1
  unsure 181, 241: a, t, c, g, or other
agcgcagttgtcgtctcttgcggtgccgttgctggttctcacaccttttaggtctgttctcgtcttccgttccgactctctctttttcgttgcagccactgaagatcctggtgtcgccatgggccgccgccccgcccgttgttaccggtattgtaagaacaagccgtacccaaagtctcgnttctgccgaggtgtccctgatgccaagattcgcatttttgactggggcggaaaaaggcanaagtggatgagtttccgctttgtggccacatg

SEQ ID NO: 4492 - DNA, 282 bp, Zea mays
  misc_feature: Incyte ID No: 700455132H1
  unsure 97: a, t, c, g, or other
aaaacacgaggggcgtctcccgcaggaactggtcatcggcacgcagggcagaggcagcatagcagcagccagctaccatccatcctctttacccctncctcgcttcgcttcctcggcggattcctcctccctcgaccgtccccgttccccgtccccttccggcgcgcaagttcgcccgagatggcaaacgcgagatcgggtgtcgctgtgaatgacgagtgcatgctcaagttcggcgagctgcagtcgaagaggctgcacgttctaaatttcaagatggag

SEQ ID NO: 4493 - DNA, 269 bp, Zea mays
  misc_feature: Incyte ID No: 700455136H1
  unsure 249, 255, 264: a, t, c, g, or other
gtttttctgcagcaaaaaattaacaaattccttgcatacaaaagggccggaaagagctttaatgctgaagtgcgcaacaggaaggactatagaaatcctgactttttgcagcatgctgtgcgataccaagaaattgatcagatagggacctgtttcagtaaagatgtttttgatccttatgggtacgataaaggtgactactatgatgagatagaagctgaaatgaagcgtgaacttgagagaaagganaggagnagaacaggntccaa

SEQ ID NO: 4494 - DNA, 137 bp, Zea mays
  misc_feature: Incyte ID No: 700455137H1
  unsure 22, 25, 31-32, 38, 42, 45-46: a, t, c, g, or other
agcttttctacgtacacagttnccngttcanngagaanaganagnnaccgagatctgcgccgatagctagcatcatggcgtcccaaggcgctccttcgtggtagcgctcctggctcgccgccaccttcctcgccggt

SEQ ID NO: 4495 - DNA, 273 bp, Zea mays
  misc_feature: Incyte ID No: 700455139H1
  unsure 40, 176, 216: a, t, c, g, or other
gctgaattgtcatcaggaaagctggagatggaagcgaggnggaattaaagaggacaataaacgcctgatgcagcggtagagcctaccgtctgtaaccggaaggtcccgggttcgagccccagcctctgcatattatgcgggtaacgcttggcgcttaaagatacccttccccagancccgcacagtgcgggaagcctacgacactggaaagcaganaaccatacaggcaatgacaggttgtgcgaggggttgtgtacttgtgtgagaggctgc

SEQ ID NO: 4496 - DNA, 275 bp, Zea mays
  misc_feature: Incyte ID No: 700455140H1
  unsure 154-155, 256: a, t, c, g, or other
ggcctccgttacgggagatgatggtttggatagcctatgcagacataaactagttccatatccagattgaaagtaaatcctggtacattagttttacgctgggtaaatgggcaacttgagagaattgaaacttgggttaaaagggctgctgatnnaagaggtttgggaccctatatccccttcaacaacgccatgggaattctattgtagaagtctatagaatctagaagagatgcagatcaattttttgccattnaagttcctatgcgagatgg

SEQ ID NO: 4497 - DNA, 262 bp, Zea mays
  misc_feature: Incyte ID No: 700455141H1
  unsure 52, 231: a, t, c, g, or other
ctcgccgctcgacttcgtgttgtcgtgggggccgttgctgtaccaggtgtcncgggtggacgagaagggcctgcagcagtgcaacagcgtggcggccaagatcaaggagcagctggagaaggggcagttcgcggacgccgaggcctcgtggtcggagctggagggcgtcgtcctcgccagctccaactccgtcaacttctacaatttctcaagacgaggcgtcgggggacnccaccgccactgccacagcggcggtgtcgac

SEQ ID NO: 4498 - DNA, 269 bp, Zea mays
  misc_feature: Incyte ID No: 700455142H1
tgtggcaatccgttggtagaagaaatgttagtgaatatggtagccaaatttgacaagtactggactgacattcaagggctcatgggcattgcaactattcttgaccctcgattcaaaactgcagtcctattgatatgttatgaggacttacttgttgtgtccggtagtgaatgtgaagatagagttgctaatgtgaagaacttgctagctgatttgatgatgagtaccatataactgagaatatgagaacatgagtcatcaacaccatc

SEQ ID NO: 4499 - DNA, 275 bp, Zea mays
  misc_feature: Incyte ID No: 700455143H1
  unsure 257: a, t, c, g, or other
tggcgatgcaatcgatgaccctcaagaaaatggtcgaggacggctgcgccgaacaaaggcatcccgctgccccaacgtcacctcccacatcctcgacaaggtcatcgagtattgcaacaagcacgccgagccgaccgggccgggcgacgcggccggcaccaccaacaggtccgccgaggatgagctcaacatcttcgacgcagacttcgtcaatgtagagcactccaccctcttggacctccatcctggctgcaaantacctggactccaagggg

SEQ ID NO: 4500 - DNA, 91 bp, Zea mays
  misc_feature: Incyte ID No: 700455144H1
  unsure 9, 12-13, 21, 24, 28, 34: a, t, c, g, or other
caagcagcntannaaaaccgnatncgtnctcgcntgttcagtttccttactacttcccgcagcccggtttgccgaccaggttccacacaac

SEQ ID NO: 4501 - DNA, 273 bp, Zea mays
  misc_feature: Incyte ID No: 700455147H1
cttcccggtctcctccgcccgttgccttcgtcccctccatctccggctgcgtcgccggcgagcccgacaccgcgaatccggatccgccgacaaggcgagagggaaaagatggggcttacgttcaccaagctgttcagccggctgttcgccaagaaggagatgcggatcctgatggtgggactcgacgccgccggaaagaccaccatcctctacaagctgaagtaggcgagatcgtcaccaccatccccaccatcggattcaatgttgaaactg

SEQ ID NO: 4502 - DNA, 270 bp, Zea mays
  misc_feature: Incyte ID No: 700455149H1
  unsure 33, 223, 252, 268: a, t, c, g, or other
cacaaagagtcaaccttgccactatagcaaggncaagacttgcaagcctgcccttgctaatgccatcttcagtactatagcttttgtgcttggtgcggtcacctcactggtttctggttttcttggaatgaagatagcaacttatgctaatgcccggacaactttagaggctagaaagggcgtcgggaaggcatttattactgccttccgatctggtgcattntgggctcctgcttgctgccagcggtcttntggtccttcatatgcnat

SEQ ID NO: 4503 - DNA, 266 bp, Zea mays
  misc_feature: Incyte ID No: 700455152H1
  unsure 23, 230, 259-260: a, t, c, g, or other
caggctgtaagatctaagattanggtcctggaggatgagctaaaacttgttgatgctgagattgcatcgcttcaagaagatttagatgcagcaactgccagaaaggacaaggcatatgaattgttgcaagaattgagagcaggtcgcgatgcgaaaaacgcacccttcatgcaaaatcgtacagttttagccaaagctagggattattctttgaggatatgctatcagantgcaagagctccacaaggctgaggtcgannattcac

SEQ ID NO: 4504 - DNA, 268 bp, Zea mays
  misc_feature: Incyte ID No: 700455153H1
  unsure 56, 190, 251, 254: a, t, c, g, or other
ttgcaatcgacaacaatctggttgggcagaggtaaatatcatgccgtgctcctgtncatagacatggttgcctgtattttatttgaatgagggttgaatagcttataacattgtgaggaagtcctaccacatattgatttttcatgttggtgttttttttgttggcattctctctccagttgtcataaantgaatgaactgtacataatttcttagagggctgttcttaagtgttgaggtggaatgagagnttnacttggataaaagg

SEQ ID NO: 4505 - DNA, 271 bp, Zea mays
  misc_feature: Incyte ID No: 700455154H1
  unsure 2, 22, 41, 47-48, 50, 72, 87, 93, 114, 131, 151, 163, 182, 200, 205,212, 219-221, 231, 240, 257-258, 266, 268, 270: a, t, c, g, or other
cnagcaggggaagatgtcagangcgctgatcaacggcctcnccggcnncnggaggcgaagatcatcgcccanctccttacctacccnctccanaccgtgaacgcgcggcaacanacggagcgcgacccctnccaagccggcgttcaagganggcgccgctacnccagttgtatctggttgtnaagaacaaggggtgaaancgctntatggcngattatnnntctctcgtcnaacaccgcngcatccaaggtatctannactattcnancna

SEQ ID NO: 4506 - DNA, 269 bp, Zea mays
  misc_feature: Incyte ID No: 700455155H1
  unsure 217, 226, 261, 268: a, t, c, g, or other
caagcaggggaagatgtcagacgcgctgatcaacggcctcgccggcgccggcggcgggatcatcgcccagctccttacctacccgctccagaccgtgaacgcgcggcaacagacggagcgcgacccctccaagccggcgttcaaggacggcgccgctcgccagttgtatctggttgtgaagaacgaggggtgggagcgcctgtatggcgggcttatncctctctcntcggcaccgctgcctcccaaggtgtctactactanttctacna

SEQ ID NO: 4507 - DNA, 270 bp, Zea mays
  misc_feature: Incyte ID No: 700455156H1
  unsure 89-131, 262: a, t, c, g, or other
tattgctgcatatcgtgccaagggcaaaagtgaagcaggaaagaagggccctggcaggccaacaggctcaaagaagaagaacgaaccannnnnnnnnnnnnnnnnnnnnnnnnnnnnnnnnnnnnnnnnnnaggaagaggatgaagatgaagaataaatggctatcctttaatgatgcgtgtggaatgtgtgtgtgtgctcaggcattattttgctaacaatgtgaattcaatgcagctcaatactagcttcagtataaaanctgtaccg

SEQ ID NO: 4508 - DNA, 273 bp, Zea mays
  misc_feature: Incyte ID No: 700455158H1
  unsure 21, 32, 36, 52, 60, 79, 81, 88, 115, 123, 170, 217-219, 245, 255, 258,271: a, t, c, g, or other
ggcggaggtgcaggtcctgcncgcttgatggncgangccatctcctggggcngcctggcngcaattcgtggctaaacangnactgctnggccggaacgtggtggtcgtacgctgngaaggcancaacatttctggcaatttctacagaacacaagttgaagtacctggcnttcctccgcaagcggatgaacaccaacccttcccgaggcccctaccnnnggtgagcccccagccgcatcttctgncggacctgcnagntatgctgccccanaa

SEQ ID NO: 4509 - DNA, 271 bp, Zea mays
  misc_feature: Incyte ID No: 700455159H1
  unsure 86, 91-92, 131, 268: a, t, c, g, or other
atcgcaccaaacatgccacaaaaccaggcctgcctggatgtgatggaggaaggcatattatgtggaggccaagctggtgttttganggagnnccatggttttcaaggagctggtgatagcaccaacatcanaggctcttgtccatgttttctttgcacaacgttccacgacaaaggtgccaggtgtaactgatgttcaactgaaaccaaggccaattagaaaagttgctgttattggtggtggtctgatgggatctggaattgccacntcc

SEQ ID NO: 4510 - DNA, 270 bp, Zea mays
  misc_feature: Incyte ID No: 700455161H1
  unsure 8, 41-42, 72, 199, 203, 257: a, t, c, g, or other
gcctcggnggcgttcagctgcttcaagatgaagctgaacanntccttcccagccactggctgccagaaactncattgaagtggacgatgaacgcaaacttcgtactttctatgagaagcgtatggccacagaagttgctgctgacgctctgggtgaagaatggaagggttatgtggtccgaatcagtggtgggaacgancaancaaggtttccccatgaagcagggtgtcttgacccatggccgtgtccgcctgctnctgagtaaggggc

SEQ ID NO: 4511 - DNA, 271 bp, Zea mays
  misc_feature: Incyte ID No: 700455165H1
  unsure 264: a, t, c, g, or other
aacaatattcgatgattcatcgtcttgaaacaaacaagttgaggaatgttgccaagttctttgcacatttgttggggactgatgccctcccttggcatgttttggcctacatcaggttgacagaggaagacactacatcatcttctcgaattttcataaaaatattgttccaagaattatcggagcacctgggcatacgcctactcaatgagaggctgaatgatcctaacatgcaaggttcctttgagtcccatcttcccaaangatcatc

SEQ ID NO: 4512 - DNA, 264 bp, Zea mays
  misc_feature: Incyte ID No: 700455167H1
  unsure 234, 252: a, t, c, g, or other
gaaaccttgtaaaggtagctgacaggaggtttggtaggaccaacttgctgatatatgggccaacttggtcagagaaaaagaagaaaagatgatttctgaagggggggttcaggtgtaatgataatcacggttgggaacggttaaggtttcaagatttgcacaggggatacttggcctagtgtaagggcataagaaggtggttgatcttggttcatgggcctatccctgattacntgcacagcacagagagcncgctttcgtttc

SEQ ID NO: 4513 - DNA, 264 bp, Zea mays
  misc_feature: Incyte ID No: 700455168H1
  unsure 2, 23, 190, 209, 213, 217, 225, 228-229, 242, 252, 255-256, 258, 260-261: a, t, c, g, or other
gnagcaacgacttggggtgacgngcaccacaagtattcgtgctgctttggtctttgcgtcctggagcattaatttcccttctgatttgggtagaggatgatgcttctcgccaagctcggggcgccgagcgttccagggaagcgtcgagttgaagaagatgctataagttgcagaatagaaacatcaccanggttgtgtcatggacaaangganatgntggtcgcnccnnttaatagtaccancattgcctcncannanannatg

SEQ ID NO: 4514 - DNA, 266 bp, Zea mays
  misc_feature: Incyte ID No: 700455169H1
  unsure 243: a, t, c, g, or other
ggcgtcctggggatgaaagtgatggggaatctatggatactagcagtgagagcagcattgagaatgatgttgagcggctaagagtctcatcattactagaaggtacacatcgattggaaaatggtggcatacgaagtgatgatggtaaaggtgatgcatcttcaagctttccaatatttgagtatatggagagggatcctccatatggtagagagcctctgacagacaaggcatcaactcttncacatagatttccagctctgaag

SEQ ID NO: 4515 - DNA, 164 bp, Zea mays
  misc_feature: Incyte ID No: 700455170H1
  unsure 17, 146: a, t, c, g, or other
caggatttacctccagntaaagctttagctgcactagctatagaggacaaaaagaggcagtatgcagccgcagagaagtacctagaagatgtgttgcaatctgctctaaccacaagtggcctataatgtgcatagttttgtttgcngtgtcttatatgttgcca

SEQ ID NO: 4516 - DNA, 269 bp, Zea mays
  misc_feature: Incyte ID No: 700455171H1
  unsure 179, 226, 230, 267-268: a, t, c, g, or other
catcaactgactttagaggcgcaggattcatatccctggagaatcttttgttctttgccaagacgttctccgcatcgtttcagagacttctaaataaacagtgcggtaacagagccacatgggagtacccatttgcggttgctggtgtaaatattacattcatgatcatgcagatgctngatctccagtctactaagccaagaacatttgtgcgagccattttatnccanatgctctccagaggatgagtgggctttgatctgctcnnc

SEQ ID NO: 4517 - DNA, 269 bp, Zea mays
  misc_feature: Incyte ID No: 700455172H1
  unsure 34, 148: a, t, c, g, or other
ccgctgtcatcaagcacatgtcaccggacatagngaagatccgtcgcctggttcgccagttccaagtgcctccaggacaagatgactgccaaggagatctcaacctggctggcggtcgtcaagcaggaagaggagctgtaccagaagntgaacccgggcgcacgcccactcggcgtctactggtggcatcgcaagtgccatatccttcaacaccagctcgagcgagtatgatgtggacatcatcgatgagtgcaagggggacgaggccg

SEQ ID NO: 4518 - DNA, 260 bp, Zea mays
  misc_feature: Incyte ID No: 700455174H1
  unsure 72, 76, 78: a, t, c, g, or other
gagtgcttgatctagatggcaatgagaatttggaaagctgttaccttgaagatatagggaagttatatcagntgcnanacctacggattaaggcaagtaatattacacttctggaaaggatagaagagcttcagtgtttggtaatactggatctctgaattgccctaatctaggtgaattgcctagaagtattgttcaacttcggaattgaaatggttactgttcatcgagcgaattgccagatggattgggaacagcaa

SEQ ID NO: 4519 - DNA, 265 bp, Zea mays
  misc_feature: Incyte ID No: 700455175H1
ctagcagctcggcgctccctcttctgactccttcgaggtactcccatcgctatcgaccgggtcctacgagcgcgggagatggcggatcaggagaccccagttgcagttgaggcccctaccccggtccttggggagccgatggacttgatgactgctctgcagcttgtcatgaagaagtcgggtgctacatgatggccttgttaagggtcttcgtgagctgccaaagcaatgagaagcagctgctcactttgcgtgcttgcggagg

SEQ ID NO: 4520 - DNA, 268 bp, Zea mays
  misc_feature: Incyte ID No: 700455176H1
  unsure 45, 60, 88, 90-91, 104: a, t, c, g, or other
ctcggctctcggtgtgggaagggaaccaaaccgagacggaggcgnagtacgacgcctgcnttccctcttccgccgagcgcccgctgcncnnttctcgtccctanctcttcatcttcatcggccaaccgattgccgctgaccccggccatcggcgactgtcccccggtttttctttaacgatttccgattcgattccatggccggctggaaccgattccaccggcagcggcggccgaggatcaggaggaagaggcttcacgacaccccg

SEQ ID NO: 4521 - DNA, 268 bp, Zea mays
  misc_feature: Incyte ID No: 700455177H1
  unsure 30, 78, 190-191: a, t, c, g, or other
ctcatggagagcacagacgaaattaagaanaggttggcagccaaagaagttgaggtgcaggagtcgaagagcaccctncgacgccaagctcacgacgattgggaacatcgtgcatgagtccgtgccagtcagcgacgacgaggcaaacaataaaattgtacggacatttggagaaaagagagtagaggannatttgaagaatcacgtggacctttgcaggatgcttgacattgtcgcattggagaagggtgctgatgtggctggtggt

SEQ ID NO: 4522 - DNA, 268 bp, Zea mays
  misc_feature: Incyte ID No: 700455178H1
  unsure 16, 73, 79: a, t, c, g, or other
ggcagtggtacgatgnccgctgcgagaatggcgctcgtctcttgcgcccgccgcctcccgtccttaccctctnccgctncaccctctacgaggccccgcgccggcgccgtctcatttctggctgcccaaccgtcgccggcgacggcaccgagatccggcaggaatcttgctctcttctgttctttatcaccgacgtcgccatcgctaactgaggccgccgtagcactgccgccaccgaagctgcggtggaagagacgaagcccctgtg

SEQ ID NO: 4523 - DNA, 266 bp, Zea mays
  misc_feature: Incyte ID No: 700455179H1
  unsure 169, 183: a, t, c, g, or other
cgccgtcatctcattctccctcgcaccgacgaggtcaggtcagagaccttcgagtactactagtcatggcccgcatctagaaggcagcaagaaagggggcggatggggcgcgcgttcgtgtacgtgatcctgggcggcggcgtggccgcgggctacgccgcgcttcganttcgcccgccgcgncgggtactcccgcggagagctctgcatcatctcgaagaggccgttgctccttatgaacgtcctgcataagcaaaggtatttac

SEQ ID NO: 4524 - DNA, 267 bp, Zea mays
  misc_feature: Incyte ID No: 700455181H1
  unsure 44, 174, 221, 229, 232, 235, 241-242, 249: a, t, c, g, or other
cttttctcgtttagaacctctaaaatttcccccactcgccagtncgcagcagcacctgtagcagccatggacgccagcggagcggtagcaaggggaagaagggggcggccgggcgcaaggcaggcggccccaggaagaagtcggtgacgcggtccgttcaaggccgggctgcanttccccgtcagccggattcaggcgctacctcaagaagggccggtaangcagttcnggngcnctggcnnccccgtntaccttgccgcgttctgg

SEQ ID NO: 4525 - DNA, 235 bp, Zea mays
  misc_feature: Incyte ID No: 700455183H1
  unsure 71-91, 188, 232: a, t, c, g, or other
acacaagcgtgctccttctgctcttgtgctaagtagctagctcacaacagaagaggacgagaggaagcaannnnnnnnnnnnnnnnnnnnnaacaacatacaccgctggccgtggcgccatgggcatcctggaccacatgtcgcatgtgtgcagcatcacggagacgaaggaggcgctcaagctcagnagaagcgaccgctgcagacggtgaacatcaggtgaagatggatncga

SEQ ID NO: 4526 - DNA, 264 bp, Zea mays
  misc_feature: Incyte ID No: 700455184H1
  unsure 46, 193: a, t, c, g, or other
ctggcccgtcgccgccgacgagaacaacaagcccgtgccgttcganatggaaggcgtctggcacgccatggaggagtgccaccgcatcggccttgctaggtccgtcggcgtcagaaacttctctgcggccaagatgtcccggctgctcgccttcgccgccgtaccgccggctgtgaaccaggtggaggtgaangttcggctggcgtcaagagaaggtcagggaggcctgcgccaagaacggcgtcgtcgtcaccgcttctcgcc

SEQ ID NO: 4527 - DNA, 119 bp, Zea mays
  misc_feature: Incyte ID No: 700455187H1
  unsure 2, 23, 27, 44, 56, 59, 66, 74, 87, 106, 113: a, t, c, g, or other
tnggcgggcccggagggtacgtngcgncgatcaaggccgcgcanttggggctcaanacnacctgcnatcgagangaggggcactctncggcgggactgcctcaacntcggatncatccc

SEQ ID NO: 4528 - DNA, 265 bp, Zea mays
  misc_feature: Incyte ID No: 700455188H1
  unsure 174, 209, 236: a, t, c, g, or other
gcggcgggcccggagggtaacgtggcggcgatcaaggccgcgcagctggggctcaagaccacctgcatcgagaagaggggcactctcggcgggacctgcctcaacgtcggatgcatcccatccaaggctcttttgcattcatcacatatgtatcatgaagcaaagagttctttngcacaccatggagttaagttttcaaatctggaatngacctcccagctcatgatggctcaganagacaaagctgtggcaggataacaaaggg

SEQ ID NO: 4529 - DNA, 266 bp, Zea mays
  misc_feature: Incyte ID No: 700455189H1
  unsure 179: a, t, c, g, or other
gggaaagctagcggctttaaagaaaatgagggatcatccagtagcgctggggaatcatccagtatggacattgacaaagctgagtcttctctaccaaagaaacaattaactggcgtctatgatttggttgctgtcttgacacacaagggaagaagtgcagactctggccactatgttgnctgggtaaagcaagatgacggaaaatggatcgagtttgatgatgacaacccaaacatccgcaaggaggaagacattttgaaaactat

SEQ ID NO: 4530 - DNA, 92 bp, Zea mays
  misc_feature: Incyte ID No: 700455193H1
  unsure 89: a, t, c, g, or other
ggaaaaaagaagcaatgagcattattctaaatgctttagagatataattcatggttccaacattccaggcgacatgtttccttttactnctg

SEQ ID NO: 4531 - DNA, 267 bp, Zea mays
  misc_feature: Incyte ID No: 700455195H1
gcggaattgcgagaactagagaagaatcataaaagagacaatactgcagtcagccctccggaggaacaacgtccaaagaaagcaaggattcagatgttttcccctgcggagggggtgccagataatgtaacagtctctgttgagtatgcgaagtctggtcgctctacctgcaagggctgcagtgagaatattgccaaaggtgccctccgccttggtgcctcttttcctgatccccgtggctacgaaaatactaagtggtaccatgtt

SEQ ID NO: 4532 - DNA, 266 bp, Zea mays
  misc_feature: Incyte ID No: 700455196H1
cttccgctcgctccccagctccagcaggcagatcagatccatccaaccacgaacaggaaggaaggtaggaggaggggctgaagttgaaccatgagtgccgtcgcggtttcgtcgtcgctgaacccgaacgcgccgctcttcatcccggcggcgctgctgcaggtggaggacttctcgccgcagtggtgggacctcatcaccaccaccgcctggttccgcgaccactggtcccgcgagcacgcccactggacgagatagccgagcag

SEQ ID NO: 4533 - DNA, 118 bp, Zea mays
  misc_feature: Incyte ID No: 700455201H1
  unsure 74, 83, 85, 113: a, t, c, g, or other
ctgctaattcctctaaatatagcattagttcagcttgtagcttcatattacatcaggtaatggatggcctcagnactatttcncngtaatgatggtataagagctcacttgcnaattc

SEQ ID NO: 4534 - DNA, 292 bp, Zea mays
  misc_feature: Incyte ID No: 700455204H1
  unsure 227, 269, 272, 289: a, t, c, g, or other
catgcttcgatgtcaggtttatctgtggtgaaatcctattgtggccatggcataggggaactgtttcactgtgccccaaacattcctcattattcaagaaacaaggctgttggtatcatgaaagctgggcagacatttacaattgaaccaatgataaatgcaggggtttggaatgatcggctctggcctgatgattggactgcagtcaccacagatggtaaacggantgctcaattgaacatacactttggtggcagacacagggtgcnaantttgacggcacggttanccc

SEQ ID NO: 4535 - DNA, 290 bp, Zea mays
  misc_feature: Incyte ID No: 700455207H1
  unsure 162: a, t, c, g, or other
aaagtcactcgctaccagagcaccctgtacacgatgcactatggtgaatatgttgcgtacctcaagaagaacagaggtgcagccccgtcaattagtggggctcctcctgtagttaatggcttcaagccaagccattgatttatcagtataaaaaaaagctcnaagaacatattactataatttatctgcgagcaatttggggggtgtagtgtaaccacccccccacagtttcatggttctagcatcattcccttcccagggaaagggcaaattggggcgttcatgacaag

SEQ ID NO: 4536 - DNA, 292 bp, Zea mays
  misc_feature: Incyte ID No: 700455208H1
  unsure 82, 219: a, t, c, g, or other
tcttcatccgcgacggcatcaagttcccggacatggtgcacgcgctcaagcccaacccgcggacgcacatccaggacaactngcgcatccttcgacttcttcttcgcaccacccggagagcctccacatgttctccttcctcttcgacgacgtcggcatccccgccgacttaccgccacatggacggatccggggtgcacacgtacacgctcgtcaacngcgccggcaaccgtcacctacgtcaagtttcactggcggcccaccttgcggcgtgcgctcgctgatggacgac

SEQ ID NO: 4537 - DNA, 285 bp, Zea mays
  misc_feature: Incyte ID No: 700455209H1
  unsure 121: a, t, c, g, or other
cttgctctctctcgcctctggttggcagagctctcttgaagcctcgagactcgtctcgccgctgctccctcagctctgccgctgcgtgcctgcgttagtgttgcattgcagcgcagccccncgagccttgagctgctagctcgcccttcaccacagtccccagacatggagttcgaagaccgctgccacaaggtccaggagcccaagttcgactgcctgctcttcgacttcgacggaaacctgtaaccgctgagcgccgggatcgcaggccatgtcaagaagaac

SEQ ID NO: 4538 - DNA, 277 bp, Zea mays
  misc_feature: Incyte ID No: 700455211H1
  unsure 220: a, t, c, g, or other
ctcactttctgcgccgccacccactacaggtaaggaagaggaggagggcaggatgtcgcaccgtaagttcgagcacccgaggcacggctccctcggcttccttcccaggaagcgctcctcccgccaccgcggcaaggtgaagtcattcccagggatgaccccaagaagcttgccatctcactgccttccttggctacaaggctggcatgactcacattgnccgtgagttgagaagccaggatccaaactcataagaaggaaattgtgaggctgttac

SEQ ID NO: 4539 - DNA, 259 bp, Zea mays
  misc_feature: Incyte ID No: 700455212H1
  unsure 24-25, 40, 60, 76, 95, 255: a, t, c, g, or other
tggtacttcaggtcactcgaaganntgatcatccgcgcanttaaatccgccttctctatnacggcagcaagagtanaaggtctcactggtgtttnggttggggaccgtaaagttgcggcgatagggatccacggttctcggatgatagtttatcacgggctcgcactaaaacataacaactgacttgctccattcagaatgattgatccttgcgggcataaagggacgcggtgtggggagcattaagggagatantaca

SEQ ID NO: 4540 - DNA, 282 bp, Zea mays
  misc_feature: Incyte ID No: 700455213H1
  unsure 45, 76, 189, 204, 257, 278: a, t, c, g, or other
ctttttggttcccctgtccccgccgctgccgaaaaaccgccgatngaggtcgtccgccgccaccgccgccgcgaanagaagggcgaagaagctatacacctcttctactgctctgaatgcgaggagctcgctctcaaggtcgccgccagttccgacgtcattcgagctccagtctatcaactggcggantttcgacgagggttnccgaaactgttcatcaacaaggcccacgacatccgggggcagcacgtgggcgnttcctggcttcttcagctcgncggg

SEQ ID NO: 4541 - DNA, 277 bp, Zea mays
  misc_feature: Incyte ID No: 700455214H1
  unsure 119-139, 229, 254, 271: a, t, c, g, or other
ccgagtcgctcgtcagatcctccagcaacacagcaccttcgccgccgccgccatgggtaaggttcacggatcgctggcccgcgctgggaaggtgcgcgggcagacgcccaaggttgcannnnnnnnnnnnnnnnnnnnnccccgcggccccgctcacaagcgcatgcaatacaaccgccgcttactcaccgccgttgttggattcggcaagaagcgcggccccaattcntcggagaagtagatctagctatggnttgtgtttattccccanagtttc

SEQ ID NO: 4542 - DNA, 283 bp, Zea mays
  misc_feature: Incyte ID No: 700455221H1
  unsure 207, 219, 229, 236, 260, 279, 282: a, t, c, g, or other
gcaagatggcacaccatggccaggaaacaataccagggaccatcctggaatgattcaggttttccttggtcacagtggtggtctgatactgagggtaatgagctaccccgtttggtctatgtttctcgtgaaaaacgtcctggattccagcatcacaagaaagctggtgccatgaatgctctgtccgcgtctcagctgtgcttaccnatggacaatacntgttgaatcntgatgtnatcatacatcaacaacagtaaggntttcagggaagctatgtgnttnc

SEQ ID NO: 4543 - DNA, 283 bp, Zea mays
  misc_feature: Incyte ID No: 700455223H1
  unsure 191, 271: a, t, c, g, or other
gctcattcctcctcaccacgctgctcgttactaaccaagcaatcaatttcctcctctttccattctcccagccacaaatcgatcggaaacgcacgcccctttctcttcgccttttcgcgtcgtccagatctcagtcgttcttcgctccatgagctaggaatccgaggtgtcctctaggctaagcgaagttngccggcggcggctaggatggggttgatatccgggatgatgatgggggtcatgttggcgtcgccatcatggccggctgganccgcgtcatgcg

SEQ ID NO: 4544 - DNA, 284 bp, Zea mays
  misc_feature: Incyte ID No: 700455224H1
  unsure 247, 260: a, t, c, g, or other
tttgagacaagtgcaatgataattacatttgtgttgctcgggaagtatctcgaggtgcttgcaaaagggaagacatcggatgcaattaagaagcttgtagaactggtcccttctactgctgttttggttctgaaagacaaagaagggaaacatgttggtgagagggagattgatgcacggttggtccaacctggtgatgtcttaaaagtgcttcctggttcaaagattccagctgatggtgttgtcngtttggggacaantcatgtggaatgaaagtatgataa

SEQ ID NO: 4545 - DNA, 279 bp, Zea mays
  misc_feature: Incyte ID No: 700455226H1
  unsure 90, 270: a, t, c, g, or other
cgctgagaacaagcaatataatggagttgtgaatgagaagataaaggagatggagcctcttcggaacagcttgggcaagtttcgtgaggnaaacaatgccatgagagcacagagtgcaggtttatgctcttctatcgaagaccttgacctaacgatcaagatgctgaatgatcgcatcgtacatgagagcatacctttatctgaggagaagcgtctggtgaaagaaattaaagaccttgaaaaaaccagtcggaagtcatctctaatgcngctaacagg

SEQ ID NO: 4546 - DNA, 278 bp, Zea mays
  misc_feature: Incyte ID No: 700455228H1
  unsure 81, 159-160, 217, 227, 253: a, t, c, g, or other
cgcatccataaacaagaaaaagaaaagaaaacccccgctgccagcgacagaagaagaaggggtcccttctccttggttgcnttgcgcctccctcctgtctgcgtgcgtgcaatcgacgcagaggcgcgggcgctcgcaccaccacgaccacgacccganngctttcatgcgctcccgctacaaatgcatcttctggcatgggagttgctcctaacantagggagacntcgtcgagcttcaaatgaagaaggcntccgatatgttatcatccaaaatcg

SEQ ID NO: 4547 - DNA, 280 bp, Zea mays
  misc_feature: Incyte ID No: 700455230H1
  unsure 33, 89, 259, 272: a, t, c, g, or other
cgcctccatccacagcgaccacgcccatcttcnctctgtccgctcacccccacctctcccgcccccgtctccgtccgcacccgtccgcntccgacttccccgtggcccagccggatccggagccgaactcgaccttgttcaggaaggagagcccgaaccgcggcgggcgggagggctctttttagcttgccccgcctgaggccagccgccccatggggcagtcgcctgagcgcgctacgtatcagctcattcgaccggngggaaggctgtancgtcggtt

SEQ ID NO: 4548 - DNA, 111 bp, Zea mays
  misc_feature: Incyte ID No: 700455232H1
  unsure 83: a, t, c, g, or other
catttctgcatccccctcccgccgcgccgcctcaccgccgccggagaagatgggtcgcgtgatccgcgcgcagtaagggtgcngggttccgtgttcaagtcccacacccca

SEQ ID NO: 4549 - DNA, 128 bp, Zea mays
  misc_feature: Incyte ID No: 700455233H1
  unsure 84, 104, 118, 127: a, t, c, g, or other
ggaaatattcaatgctcatgctgaaacaaaagaagcgaagttacagtcagagttggcagctctcatgtacatgaagactagggntgtccgtgtacgtggcccangtggacgactaacntttggtccna

SEQ ID NO: 4550 - DNA, 127 bp, Zea mays
  misc_feature: Incyte ID No: 700455234H1
  unsure 126: a, t, c, g, or other
catccatcgatccaattccaatctgcagggaaaggaatattgtagaacacgttaacaaaattgctccaaggttccaggagggaatcaaggccttcttaggcagcccaattgttggggagatacgcng

SEQ ID NO: 4551 - DNA, 292 bp, Zea mays
  misc_feature: Incyte ID No: 700455235H1
  unsure 176, 216, 231, 236, 247, 267, 269: a, t, c, g, or other
gtggaaccagagttccagttggtggtggagacaacaacgttgttcacaaagccgaggacgttgtgagcactatgcttgccaagggtttcgtgctaggcaaagacgcggttggcaaggccaaagcattcgatgagaagcatggcttcacatccacagccggtgctacagtggcctcnattgacaagaagattgggctgactgataagatcacgacanggcactttccttggntagcnggaaggtgaangaaatggaccagaattccangnctccgacaagaccaagtccgcat

SEQ ID NO: 4552 - DNA, 287 bp, Zea mays
  misc_feature: Incyte ID No: 700455236H1
  unsure 217, 240, 247, 249, 253, 257, 281, 286: a, t, c, g, or other
ggcgaaccataacttctcccagatctggactgtcaaattgcgatagggaagatgtgttatgaaatctgcttgttgtgccatgtcggcttcaaattaagcagcatgaatggagtctacgaatgtggagtcgtattcctagccagatgacccgcgcagcataaatcaagaagattccatgcatggcattcgatgaacggaacctcgcgctatacatcgnggtcttgtggatgtaaccacccntgtttgnanaacngacnggacactaaacggctgtgattcgnttggnc

SEQ ID NO: 4553 - DNA, 284 bp, Zea mays
  misc_feature: Incyte ID No: 700455237H1
  unsure 189, 239, 252, 277: a, t, c, g, or other
atcaactttttgagaacacaattggttgtaagtcgtgaaaataaattacgcttgctgatgatttatgcagcacttaacccagagaagtttgaaagcgacaagggtgcaaaattaatgcagttggcaggattatctgctgatgacatgatgctgtaaataatatgcgttgcttatgtgggcctgataccnaaaagtcttcagtagggggtttacactgaaatttgatgttcacaagaagnaacacacaaatcnaaaagagcgaacaggggaagaatcnacatggg

SEQ ID NO: 4554 - DNA, 123 bp, Zea mays
  misc_feature: Incyte ID No: 700455239H1
  unsure 2, 43, 86, 106: a, t, c, g, or other
gnagtgggctgcgaccgaatccaacataagaggaaaggggcgnttgctttatattcgttctaacctgcgatctccgtccattccanccgagaggtcgtgtgcgcgnggatctctgcgtggaac

SEQ ID NO: 4555 - DNA, 277 bp, Zea mays
  misc_feature: Incyte ID No: 700455240H1
  unsure 211, 250: a, t, c, g, or other
tatctatctagcgagagagagagaggaaagctagctagctagcatggagtgcggcagcaagaaggcagcaggcggtgtgttggcgctgctgcttctccagctggtgttagctccgacgacggcgacggcccgcctcctgcaggcggatacctccaccgtggttggcctggacatcatcgcgagggatttggccatccagtgagaggcattnctctgtggtgaaactgtgtctcctaccatgctatacgcnaccatgggtgccaatgcattggccaaa

SEQ ID NO: 4556 - DNA, 275 bp, Zea mays
  misc_feature: Incyte ID No: 700455241H1
  unsure 233, 250, 272: a, t, c, g, or other
gcagctttgttagctggattgcctctggcagggaaatcctgcctggtggaggacaatgtttggaatgctgtagttccatccattctgctggctgtaggaatggccttttcgcctgaaagccctcgttggctattccagcaaggaaaggttactcaagcagaattagctgtaaaaagactgtatggaaaagaatggtaccgaaatatgtttgatctgagagctagtggccaaanttcttcggagtccgaanccggtggtttgatctttcaacnagc

SEQ ID NO: 4557 - DNA, 274 bp, Zea mays
  misc_feature: Incyte ID No: 700455243H1
  unsure 239, 263: a, t, c, g, or other
cgctggtcgttgcctgctgcggattgcccccaggcgggccccactcattccgctgctgatatttcgtttggttctcctttccgtcttgtccgtcgccgaggccttccgctcgctccccagctccagcaggcagatcagatccatccaaccacgaacaggaaggaaggtaggaggaggggctgaagttgaaccagagtgcctcgcggtttcgtcgtcgctgaacccgaacgcgccgctcnttcatcccggcggcgctgctgcangtggaggattc

SEQ ID NO: 4558 - DNA, 274 bp, Zea mays
  misc_feature: Incyte ID No: 700455245H1
  unsure 250: a, t, c, g, or other
cagccacaaccacaaccactttcatcagtcatctctggttatggaggctttggaagctcaagtaatatacaaggaaattttacccttagtcagagtaccggctctgcatcagctcttgggtttgatgaagcattgagcagacagtacaaaaacaccagtcaatacatggctctccagcagggcgacaactctggaatgtgggttcatgggctctggttcaagagcggcctcgacgcttccgcctaaccantctatggttaccagggacagagtc

SEQ ID NO: 4559 - DNA, 276 bp, Zea mays
  misc_feature: Incyte ID No: 700455247H1
  unsure 189: a, t, c, g, or other
gtcggctagtcccaaggctgctgccgccgcctgccgctaggggatcgcttgctttcctcggaccactctgccgaccacatctacaccgcatcaacggtccttccaagtgagctccaatcccctgtctgtagatggagagggtgctcaaggatgacgccgtcgaggagaagggcgagcgcgccaggatgncatcgtttgttggggccatggcaatcttcggattggtgaagaccacattgggcccaaaaggaatggacaagatcctgcatcaactgg

SEQ ID NO: 4560 - DNA, 282 bp, Zea mays
  misc_feature: Incyte ID No: 700455252H1
  unsure 188, 212, 236, 241, 272, 279: a, t, c, g, or other
gaatctaaggaatgggggacattataacacaagcagaagggatgccactgccagtcactacaatggagattctagcattggggcttcattgcacaacctcactgatgcgtatcatggaagcaggcgcagcttaagcacgactatggatatcatgagtcagctggagagtaaagtcgatgggcgactcnatcagaacctcaggtcactgtcgnttggaaattcaagtcctccatcancagcntcatatgcccaaaatggtctggaaacttagnaatgaanctg

SEQ ID NO: 4561 - DNA, 112 bp, Zea mays
  misc_feature: Incyte ID No: 700455253H1
  unsure 38, 42: a, t, c, g, or other
cagttttacccaaatgggttggggatctcccgaatggnagantgtgtccctgagatggaattcagcttgagtcttctggcaattggtcacaactattcatggcttcctgtga

SEQ ID NO: 4562 - DNA, 111 bp, Zea mays
  misc_feature: Incyte ID No: 700455254H1
  unsure 29, 45, 62, 72, 89: a, t, c, g, or other
gccggcgcctccacttcgttttcctcacntctctcctccagcttnagggtccggcggcgaanggaaggcaanatgtacaccgcgagganagaagatccagaaggagaaggg

SEQ ID NO: 4563 - DNA, 280 bp, Zea mays
  misc_feature: Incyte ID No: 700455255H1
  unsure 176, 195, 207, 252, 262-263, 265, 273: a, t, c, g, or other
gccacctcctccttttgaaccaaatggcgcaccacatggcaatgctggaatgcttgggccaatgatgggtggcccagcaccgattatagctatgcctccaaatttccgccatgatcctcgccgcctgagaagttataacgacctcgatgctcctgatgaggaagttcactgtgccngacttacagaagcttgtanggtccagcactnccagatacccgtagtcaagttttcccgtttcccccatggtgaatnggcttttttnncnttatgaangcaaaag

SEQ ID NO: 4564 - DNA, 278 bp, Zea mays
  misc_feature: Incyte ID No: 700455257H1
  unsure 2, 33, 45, 50, 63, 91-92, 118, 121, 123, 130, 132-134, 146, 217, 238: a, t, c, g, or other
gncttgtttcctgccttatatcttgtatttcgncttattacaganttganggttcttgcttantttagatcaagtatagaaatttgtatgnnttcaagtctcattttatctgaaaggnttntntctcatntnnnctgatgtggcantttcgtcatctgaagcatgagtgacaagttgggaatgatgtggtgattagaatgcagtattgggccaagtnccaagttgtcaacttaagcgnctgtttaccaaagaaccgggaaaagggggcccaaacatgt

SEQ ID NO: 4565 - DNA, 277 bp, Zea mays
  misc_feature: Incyte ID No: 700455259H1
  unsure 79, 92, 162, 190, 208, 253, 270, 273: a, t, c, g, or other
gacgaggccctgcaggacatcgacatctacaacatctacgcgcccaactgccagtccccccggcctgcgtctcgccgcncatcaccccctcnatggacaggtttgacccgtgctgcggattattaacgtgaacgcgtacctcaacgacccggacgtgcaganggcgctccacgccaacgtcacccgcctncgaccacccctggtccgnctgcagcgcatgtcttgagacgtggactgacagcgccaggacgtnctgctattcttcacggngcncctc

SEQ ID NO: 4566 - DNA, 273 bp, Zea mays
  misc_feature: Incyte ID No: 700455261H1
  unsure 216: a, t, c, g, or other
gaaaacttcagttggtcttgtatatctccttgcctgtctcctggaacctttcatgccttccttttcaaaagaagtgctacgtcaattaaacctgtccccagaagaaaatatttctttcagtgaagaaaatggcgaaagtgtgaaggcaaaacccccttgggatcttgtaccagcagggcacaaaatagggagggctgtacctctgttttgagggantgaaagatgaaaagtgagtgagtatagggaaaaaatatgcgggcagtccaagctgag

SEQ ID NO: 4567 - DNA, 268 bp, Zea mays
  misc_feature: Incyte ID No: 700455262H1
  unsure 265: a, t, c, g, or other
caggctgtaagatctaagattaaggtcctggaggatgagctaaaacttgttgatgctgagattgcatcgcttcaagaagatttagatgcagcaactgccagaaaggacaaggcatatgaattgttgcaagaattgagagcaggtcgcgatgcgaaaaacgcaccctcatgcaaaatcgtacagttttagccaaagctagggattattcttgaggaatatgctatcagaactgcaagagctccacaaggctgaggtcgacaattcngag

SEQ ID NO: 4568 - DNA, 131 bp, Zea mays
  misc_feature: Incyte ID No: 700455263H1
ctttccttttggaggcatcaaacgatgaaaattcagatgttcggcaggctgctgtctatggtgtgggtgtatgtgccgagtttggtggtcagtttttcgccctctagtaggagaggccttatcaaaattaa

SEQ ID NO: 4569 - DNA, 108 bp, Zea mays
  misc_feature: Incyte ID No: 700455265H1
cacgcaccagcatccttggcagcgatctgcttaattgcttctcccagcggcgtgcggccaagctagtaggggtccatcagatatccacgccatggccggcggctccaa

SEQ ID NO: 4570 - DNA, 101 bp, Zea mays
  misc_feature: Incyte ID No: 700455266H1
  unsure 8, 10, 12, 67, 70, 98: a, t, c, g, or other
ggcgaganananggagggagggacgagatagattcatagatactagcggaggaagcgagtcaagggnaanatgcggactcccgcgatgcgcgttgccnaaa

SEQ ID NO: 4571 - DNA, 285 bp, Zea mays
  misc_feature: Incyte ID No: 700455267H1
  unsure 221, 250, 269, 277, 281: a, t, c, g, or other
gcagcatgtgacaccttcagatctggtgctgttgagcagctgagaactcatgcaaggaggcttcagatacctatatttgagaagggttatgagaaagatccggcagttgtagcgagggaggctattcaggaagcaacccggaacaaatcagatgttgttctggttgacactgctggacgtatgcaggacaatgagccactcatgagggcactctccaagcnaatcaattcttcaatagcccagacctggntttattggtgggagaagcntggttggnaacntgcc

SEQ ID NO: 4572 - DNA, 283 bp, Zea mays
  misc_feature: Incyte ID No: 700455268H1
  unsure 184, 236, 266, 272: a, t, c, g, or other
acgaggatgtgctcttcagtgtgctatgctcagccccactttcaaagtgcgggaattccaggttaatgatgggtttcctttctcagttgcgtgtcatggaaacaagactcccagaacagtgcaccccaacagacccttgtattcccaaaggggaatgcaattccgagcattaaatctctaacgntctataaatcgagtacattgaagtttgatgttttgttatgtgggtacaggcnactcgcaaattccaccaaaggttagcactnccaggntgggcctttcc

SEQ ID NO: 4573 - DNA, 261 bp, Zea mays
  misc_feature: Incyte ID No: 700455269H1
  unsure 44, 141, 229: a, t, c, g, or other
cgctcccccggttccccttctctgcttcgccatcttttgctctncgcttggctcgtcaatcacctcctacgctccacacgccgccggcgactacaactgcttctgccgtggttacagagaagaagggttggggagaagacnacctaaatcaattggatctgggaatattcaggtctaaaaagtcaggttttcatcaaggtaggaaaaggaaactttttctgtacggtanggtttcccaactgcagcagtggtttgcttaat

SEQ ID NO: 4574 - DNA, 274 bp, Zea mays
  misc_feature: Incyte ID No: 700455270H1
  unsure 127, 237, 241, 270, 273: a, t, c, g, or other
cgtatccctaatcccacctccagtctctgggcaccaaatttccggcggcgatggcggcggctgtggcgaggtcagggttccggcgcatgttctccgtctctgccttcgcgccgccgaaggccccgcngcgcgccccaaggccgacccatcccccaacctcttcgtctgcggcttaagcaagcgtaccacaagtgaaggattagagatgcctttgcggagttggtgaagtttgcatcncganttgtgaccgatcgtgtcagtgggtttctnaang

SEQ ID NO: 4575 - DNA, 143 bp, Zea mays
  misc_feature: Incyte ID No: 700455272H1
  unsure 28, 64, 72-73, 80, 94, 129, 141: a, t, c, g, or other
tgatctcacctagcgagagagtagagangcaacgctaggctagctaacatgagagtgcgggcancacaaaanngcagtangcggtgtgttggcnctgatgcttatccagctggtgttagctccgacgantgcgacggcccncc

SEQ ID NO: 4576 - DNA, 275 bp, Zea mays
  misc_feature: Incyte ID No: 700455273H1
  unsure 127, 133-134, 136, 138, 189-190: a, t, c, g, or other
gcgaagaaggaagctcctgcccctcctaaagctgaagccaaagcgaaggctttaaaggccaagaaggcagtgttgaaaggtgtccacagccacaaaaagaagaagatccgcacgtcacccaccttcnggcggnngnanacactgcgactccggagacagcccaaatatcctcggaagagcgctcccagnngaaacaagcttgaccattatgctatcatcaagtttccgctgaccatgagtctgccatgaagaagatagaagacaacaacacactt

SEQ ID NO: 4577 - DNA, 272 bp, Zea mays
  misc_feature: Incyte ID No: 700455274H1
  unsure 7, 77, 271: a, t, c, g, or other
cgcagcncctgcgcccaccgggatcgtgatggagagctgggtccgcgcggtggtggaggccatccactcctcttcgntcccagacagtcatctacctcgccggcggtgcatcccaggcgctcggttggctcctctccgtgcccggcgcttcgggcaccgtcctcgaggtcgtcgtgccctactctagggcctccatggcgcagttccttggcaagatgcccctgcaatcactagcaagcaggctgcagaggacatggcatggccgcatacna

SEQ ID NO: 4578 - DNA, 270 bp, Zea mays
  misc_feature: Incyte ID No: 700455275H1
  unsure 90: a, t, c, g, or other
gcgggcgtgagaagccatgagcagcaaagtctctcgcgacaccctgtacgaggcggtgcgggaagtcctgcacgggaaccagcgcaagcnccgcaagttcctggagacggtggagttgcagatcagcttgaagaactatgatccccagaaggacaagcgcttctcgggcaccgtcaggcttaagtccactccccgccctaagttctctgtgtgtgtctgggggaccagcagcatgtgacgaggctaaggccgtggatatcccccacatgg

SEQ ID NO: 4579 - DNA, 268 bp, Zea mays
  misc_feature: Incyte ID No: 700455277H1
cttgtatatgccacactcgcatacacatacctgacaaaaggaaaccccaactgccgcttgaataccttggatggtatgacaaagaaccaattgtacataacaccccagatttacaactgcctgtgtacttcttatgctgatgagaaggaaaccctcaatatgctgtgggttcgtgctattgagagaggcctaatcaagaagagcgtgtacaaactgatgcacgaagcaaggctggatcaacaaagcttacagttgagactgggtgata

SEQ ID NO: 4580 - DNA, 270 bp, Zea mays
  misc_feature: Incyte ID No: 700455278H1
  unsure 265: a, t, c, g, or other
atcgaagtggggagcactcattgagaaccaccagtacaagagagaaaggtgacacaagtaaaggggacatccatcaccatgtccatcacatccacagcagcggcaacaagctagtagcagatgttttcttcttccacgacgtcctacgcccagggtccgaaatcacgccgatcatcccaccgaccaccaccctaccacctctgctgctctccgcgaggccgacgcgctcccgttcttccaccgggcgcttcgccgacatcctcgncatgt

SEQ ID NO: 4581 - DNA, 273 bp, Zea mays
  misc_feature: Incyte ID No: 700455279H1
agatcccaagcagtgctttgcacccaaaaccatttcatgccctagtgcgcctccagtggttgatgttagtgaccataacaatgatatagaagaggagatgattaaggcagcaatgaagcttcaaaaagggaagctgacgggatgaaaaatgttctaagtagtggtcaatctgaaaacatgtcacgtgggcagaggtgatcatgagcttgctcgggcggtttctttgtccttggagacagcagagcgagagagagctctgcgccaagagggatg

SEQ ID NO: 4582 - DNA, 285 bp, Zea mays
  misc_feature: Incyte ID No: 700455280H1
  unsure 187, 248, 283: a, t, c, g, or other
ggcatttgcttgttgtcaaatgggtctggtcgaaagatgagtctcttggagttgtctgtctgtcaagatttctggtgtaatccttatttatttagtggcaggatgttggttgtgccgtggttgtgccgtgggacccttggatgccaaaacatgtagggttgatttggtgatcagagatcacgaggantccatgggagatgaatccattgctattcaaattgaatagcaagggattcctccccaggatncctgtgattctggtcaccaaaccagcccataaggnaa

SEQ ID NO: 4583 - DNA, 131 bp, Zea mays
  misc_feature: Incyte ID No: 700455282H1
gatcaatattgtcatgggagcataagcttgtgtatattagatccatcagaattttggagaaatatcaaattgcctctttcttggatgcactttcattcagtcacagtctcattagacttcctgagcaaatg

SEQ ID NO: 4584 - DNA, 279 bp, Zea mays
  misc_feature: Incyte ID No: 700455283H1
  unsure 32, 82, 103, 214, 229, 232, 235, 244, 251, 266: a, t, c, g, or other
agcctccgtccgaccgtcctcgacctcccgtnccgccgcctcccacagtcgcaaccctagtcccacccgccgtcctcccgcnctcccgttcccattttcagtngccgagccgcgtacagcgcacgcactgcacgcgcatcggcacttccagcgacgcgtcgtgagcttctcccttcgacccttcctgtggcgcgtcgtaagctctgtgcaggcnacggcggcgcgctancanttnacggggggnaggcggnattgttccccttggncgctcttcatccg

SEQ ID NO: 4585 - DNA, 281 bp, Zea mays
  misc_feature: Incyte ID No: 700455284H1
  unsure 185, 207, 228, 259, 264, 277, 280: a, t, c, g, or other
caggcagatcagatccatccaaccacgaacaggaaggaaggtaggaggcctgaggggctgaagttgaaccatgagtgccgttcgcggtttcgtcgtcgctgaacccgaacgcgccgctcttcatcccggcggcgctgctgcaggtggaggacttctcgccgcagtggtgggaccttcatcaccancaccgcctggttccgcgaccantggtcccgcgagcacgcccanctggacgagatagccgagcagcttcgagttngtcgncctccttgcctangang

SEQ ID NO: 4586 - DNA, 275 bp, Zea mays
  misc_feature: Incyte ID No: 700455286H1
  unsure 152, 247: a, t, c, g, or other
ggtcagattgggcgtttcccgtgttcttcttcctcgcagcggcggagttcgcggcggggacgcggtcgccgtcggctttcgtacaaaacgccatctactccaaccgcatcaccatcttctccaagacttactgcccctactccatgcgtgcnaagcacatattttcgagaccttaaggaagatccatatgttgttgaactagatacccgagatacagtaaatgcgctttcaaatggacagctccagnaactttcgggaagagtcagtcacatgat

SEQ ID NO: 4587 - DNA, 273 bp, Zea mays
  misc_feature: Incyte ID No: 700455287H1
  unsure 236: a, t, c, g, or other
cactcccagggtatactccatagagacctgaaatcagagaacatacttctgggagaagatatgtcagtcaaagtcgcagatttcgggatttcatgcttggaatcacagtgtggaagtggcaaggggtttacaggaacctacaggtggatggctccggagatgatcaaagaggaacatcatactaggaaagtggacgtgtacagcttggaatcgtcatgtgggagatcttgactgcnttggtcccgttcagcgacatgactccagagcaggctg

SEQ ID NO: 4588 - DNA, 268 bp, Zea mays
  misc_feature: Incyte ID No: 700455290H1
  unsure 9: a, t, c, g, or other
gccgaagangaggagaagcgaagcaagcaggcttcgagaacaagactgcagggggagggggaggaccaagcgaaaggggaactagagcaagatgggcggcgcactgctgcttgcgctcctcctcgtctctgctgctgccgcccctcaggtacttggagttggcaatggagacaatcacatgagaatcatccaggaggacatcatcgagacagtcaacaacccatcccagtgctgggtggacagctcacgtaatccttacttttcaaac

SEQ ID NO: 4589 - DNA, 270 bp, Zea mays
  misc_feature: Incyte ID No: 700455291H1
  unsure 9, 72, 74, 78, 80-82, 91, 201, 247, 257: a, t, c, g, or other
catgacccntaacaggggccctctcagccctcctaatgacctccggcctagccatgtgatttcacttccacncnatanannnaccgatacnaggcctactaaccaacacactaaccatataccaatgatggcgcgatgtaacacgagaaagcacataccaaggccaccacacaccacctgtccaaaaaggcctttcgatangggataatcctatttattacctcagaagtttttttcttcgcagggnttttctgganccttttaacatcc

SEQ ID NO: 4590 - DNA, 264 bp, Zea mays
  misc_feature: Incyte ID No: 700455293H1
  unsure 48, 92, 95, 99, 149, 183-184, 190, 234: a, t, c, g, or other
ggcggtgacgacgcgctgctctctgacttctgtgccacactgctcggngtttccggagccctgggtgcccagcaagtcttcgccttctgcgnaanatancctgcaggcggcagccacgtgctggaagcaggcgagcacccgccggggcncctgggcacacgaggggctatgcacgaggtcgcnngcatcntgctgggcgaggggccgaccaaccagaaaggttaacgctggcancactgggggactggcacagacctggggcgt

SEQ ID NO: 4591 - DNA, 265 bp, Zea mays
  misc_feature: Incyte ID No: 700455294H1
  unsure 185: a, t, c, g, or other
atccacttgcctcggccgctatcgtgaccgggaacaacaactgcgagatggccgcggtggagacctcgggcacggcgatagggtcctccgggagatgggcactacacggcaagacagccctcgtcaccggcggcacccgcggcatcgggcgtgcggtagtggaggagctggcggcgctgggggcngcctgcacacatgctcccggaaggcggaggagctcggcgagcgcatcaaggagtgggaggccggggattcagcgttaccg

SEQ ID NO: 4592 - DNA, 77 bp, Zea mays
  misc_feature: Incyte ID No: 700455295H1
  unsure 43: a, t, c, g, or other
gcctctgaccgtaccacctctgttacctgcaccgccgctccgntaaattcgcggccccgattcgcagatgcctcccc

SEQ ID NO: 4593 - DNA, 289 bp, Zea mays
  misc_feature: Incyte ID No: 700455296H1
  unsure 72, 210, 288: a, t, c, g, or other
ataacgctctgtgctttgtgccgcttgtggcgtcctcaccgaacctccgctcccttcaagatatgggggtgntccggcgcctgggacctgccattggaggtcatcgctgcacgtgtcctggccttgttgagcttcaccttgagaagctacaggttggcgaccgtgggcttgcggcgtttccgcctgtgccaatctggaagttctgttccntgtcaagacccctgagtgcatgattcagggatcatcagtgttgccgagaagtgccacaaactccgcaaactgcatgtng

SEQ ID NO: 4594 - DNA, 165 bp, Zea mays
  misc_feature: Incyte ID No: 700455401H1
cgccggcgcctccaacttcgttttcctcactctctcctccagctcagggtccggcggcgaagggaaggcaagatgtacaccgcgaggaagaagatcccagaaggagaagggtcttgaggccctccgagttcgaggactccggttgacccaaggcttttcttttga

SEQ ID NO: 4595 - DNA, 284 bp, Zea mays
  misc_feature: Incyte ID No: 700455404H1
  unsure 53, 66, 101, 112, 140, 166, 172, 186-187, 194, 241, 261, 270, 276: a, t, c, g, or other
ctttctttggaacaaagaggttaattgggcgacgctttgatgatccacagacncagaaagagatgnagatggtgccatacacaatcgtgaaaggctcccanatggtgatgcntgggttcaaacaaacagattgggcaagnagtactcaccaagtcaggtcggtgcntttgtnctgaccaagatganntgagganagctgaatcttaaccttggcaagtctatctccaaaggcagtgattantgttcccagcttaattccantgacgctcncggtcnggccacaa

SEQ ID NO: 4596 - DNA, 273 bp, Zea mays
  misc_feature: Incyte ID No: 700455406H1
  unsure 184, 228, 234: a, t, c, g, or other
ggccggcgcgccagttgaccagaccatcgcgacgctcgcagctcacttggagcagggcgactgcatcatcgatggggggaacgagtggtacgagaacacggagaggagggagaaggccatggaggagcgcggacctcttgtatcttggcatgggtgtctctggaggagagagggtgcccgcaanggcccgtccttgatgccggaaggctcgttcgacgcttacaagtnactcgnaagacattgttctcaaggtggctgctcaggtccctgaca

SEQ ID NO: 4597 - DNA, 117 bp, Zea mays
  misc_feature: Incyte ID No: 700455407H1
  unsure 38, 68, 71, 80, 84, 103, 116: a, t, c, g, or other
ggcaaactctcttactacatggctgatgggaagaagcnttagggcaaaggcgaaagccttcccatgtngtnctacagacnacanaaaagattggtcgccaganacaacagtccagnt

SEQ ID NO: 4598 - DNA, 283 bp, Zea mays
  misc_feature: Incyte ID No: 700455409H1
  unsure 45, 85, 101, 105, 219: a, t, c, g, or other
cttgtgtccgtgcaaattggtgatacttgaacagggatctcctcnatattagtgagcaggatgtataatcctcccagtggggcanggacatgtccctaatnacgnatcatgtggcagaagcgccatgaggagaagggctgcctatatggcatgcctgttcactgcgtgctgctgcttctgctgcttcgagaacctgtgagtggctgcctcgaggctatnctgctggctgctgctagttctgcttggagggcatgggcgtccatcatcgtggagatgtggccat

SEQ ID NO: 4599 - DNA, 275 bp, Zea mays
  misc_feature: Incyte ID No: 700455412H1
  unsure 46, 57, 65, 83, 134-135, 138, 153: a, t, c, g, or other
ctttgattggaaaggacaacgatgctgagctgcttcagtgcatganggttgcatgcncttgtgtnctttcttctccaaagggnaaggccctacaatgtttgaagtttaccagcttctgagagctgttggagagnnatntcatttcagtgcagnctgacgatgaattgacgatgctaccctccaaaatgccaatcctgaagatgagcttattgtagcgaactagtttagcctatgtgatgagtgggtgcttgtcggataccaaatgttgcaggagt

SEQ ID NO: 4600 - DNA, 276 bp, Zea mays
  misc_feature: Incyte ID No: 700455413H1
  unsure 21, 23, 71, 91, 98, 114-130, 149, 188, 201-202, 209, 213, 261: a, t, c, g, or other
ggtttagccatggcggccgangnaccagactccttgtaccaagctccgccccggcaaagcaaagaacgctngaagaaagacgatagagggnacaagtnggggccaggcctaatnnnnnnnnnnnnnnnnnatgaggagccgtcggtggngccggagcaagagcacccggcgggggtagttgaggcggnagtacaggtggannatgaggntgangaagaggcgactgcggcggctgaaggctatgagtccggtaaggtggtngcgagcggctttcct

SEQ ID NO: 4601 - DNA, 117 bp, Zea mays
  misc_feature: Incyte ID No: 700455414H1
  unsure 49, 52, 56, 59, 66, 84, 89, 91-92, 94-95: a, t, c, g, or other
tcagctaggagcaggccgtgtatacgccatccaccacggcaaacatgtnctnccgnctncctggtnctggagcagcagcaagangcgcnanncnncgtactcttgttgtccgtcaac

SEQ ID NO: 4602 - DNA, 193 bp, Zea mays
  misc_feature: Incyte ID No: 700455417H1
  unsure 47, 61, 64, 72, 79, 89, 129, 138, 153, 174, 182: a, t, c, g, or other
aaaccttctggcttctgcactgctctcctccacccctcaacgaagcntctggtgcctcggncancgcagcancctggcntgccccgggncccgggcgtggtggtcaggtctcaggtgtggtgacgcttntcctcttcnggcacgtgacgcgtnatccccaatctcccgagaggnggcggggncgttttattct

SEQ ID NO: 4603 - DNA, 159 bp, Zea mays
  misc_feature: Incyte ID No: 700455420H1
  unsure 11, 16, 23, 40, 82-83, 128, 132, 138, 140, 145-146, 150, 153-155: a, t, c, g, or other
ttccaggtgcnccgcnggtccangggctccctggagatcntcttctcccggaacaacccgctgttcgggagcaacgttcctnnaacccgttgcagcgcttgggtacatgaacatcagccaacggtagnggtncacggncngatcnntccncannnggta

SEQ ID NO: 4604 - DNA, 270 bp, Zea mays
  misc_feature: Incyte ID No: 700455422H1
  unsure 3, 67, 110, 142, 153, 175, 179, 226, 265: a, t, c, g, or other
canctgctcctgccgcagggttacccgtgcaccgagcacaccgttcaaacctatgatggctttcttntggactcttgcagcatattccacatggcagaaatggaattgcngtaatactggacctccagttttgcttcagcanggtctttttcnagggtggagatacatggttcanaaanctccaatgaacaatcacttggatatatccttgctgacaatggttttnatgtttgggtcggaaatgttcgtggcacagttggagtanaggcc

SEQ ID NO: 4605 - DNA, 264 bp, Zea mays
  misc_feature: Incyte ID No: 700455431H1
  unsure 101, 186: a, t, c, g, or other
cgggatcaaggagccagagagcgggacgcagcgagcgttccgccggagatcgagaccgtagctagggtttgaggcgccgggctgcggtggacgagatgtcngacgccggcgaggaagcggctgatgcgggacttcaggcgcctgcagcaggacccgcccgccgggatcagcggcgcgccgcacganaacaacatcatgctctggaacgccgtcatattcgggccggatgatacgccgtgggacgtggcacgttcaagcttacct

SEQ ID NO: 4606 - DNA, 102 bp, Zea mays
  misc_feature: Incyte ID No: 700455433H1
  unsure 2-3, 59-60, 65: a, t, c, g, or other
tnnatctccagtcgattatcaaggagcaagagcatgtaaagccaatcgtagagtttgcnnctgtncacaggttcaaggccctttcttagaagataggttgag

SEQ ID NO: 4607 - DNA, 271 bp, Zea mays
  misc_feature: Incyte ID No: 700455437H1
  unsure 60, 126, 152, 169, 184, 199: a, t, c, g, or other
cccgaattcacctgcagatgctgaatgggcactgtctattcctatagaagatttcatatntataatgcatgatgtgcatgttgtaattggtgagcttttcagaatccagggcagctttattggacnatgtgaaatcagtcactaggggtcangccccattgaagtattnaatcttgtgaaaggnagtatattgcaagcngctgaacctttaaaggagctgttgcctgcaataatggatgtcatgattggaatcatagttaagaggtctaat

SEQ ID NO: 4608 - DNA, 120 bp, Zea mays
  misc_feature: Incyte ID No: 700455441H1
  unsure 6, 70, 85, 93, 99: a, t, c, g, or other
ccgganatgacgtacctggacctgtcccacaacctcatccggggcaccgtgccgctgtcgctggagcggntgtccacgctgcagnagctgganctgagncttacaaccggcttgtgcggg

SEQ ID NO: 4609 - DNA, 261 bp, Zea mays
  misc_feature: Incyte ID No: 700455445H1
  unsure 38, 61, 131: a, t, c, g, or other
cagaattggctagcaaagcaagagaggacacacatatntctggtataggagctagaaagcnagctagctacctacgtatccaccaccatgagtcctttcggggcggtgatcacgccagaaacgctcaagtnactgtccaagtaccagggacgtgagatcacgcaggtggattgtgcgcgggaggcgatgaggctgatccacgcggaagacaagaacctgcaagccgagaattccgcatgggaactcaagaagaagttcggc

SEQ ID NO: 4610 - DNA, 267 bp, Zea mays
  misc_feature: Incyte ID No: 700455448H1
  unsure 31, 41, 73, 76, 82, 120, 168, 204, 218, 221, 224, 226-227, 247, 258, 265: a, t, c, g, or other
ctcaacacagcacaggcagctcgagagaganagagagaganagatgtcgtggttcgggcaccactaccacaancanccggcncccccggcgtgcgggccccaaccaggtgttcaagatcntctgccgcgccaacgataactactggcctggccgtccgcgacggcgtngtcgtgctggccccggttcaaccccaaggatgaccnacaagtcatggtancanggncnntgcgccttaagcacccggtnaaggacgaggnaggcatncc

SEQ ID NO: 4611 - DNA, 128 bp, Zea mays
  misc_feature: Incyte ID No: 700455449H1
  unsure 5, 59, 98, 123: a, t, c, g, or other
gaganttagggttcgattccggagagggagcctgagaaacggctaccacattccaaggnaggcagcaggcggatgcgcggtgcgcgcttctgtcccanaaggagcaggacattacagattatngctcg

SEQ ID NO: 4612 - DNA, 126 bp, Zea mays
  misc_feature: Incyte ID No: 700455451H1
  unsure 2, 4, 21, 34, 65, 67, 74, 78, 97, 107, 123: a, t, c, g, or other
cnanaaccaactccgcgagangtgatgcggagcngcaaagcgggacctgacgaatgctacgcgangnatcgagngggnaccttgcgtcattacagcnggaggagaanaaactcgttgctgaantta

SEQ ID NO: 4613 - DNA, 152 bp, Zea mays
  misc_feature: Incyte ID No: 700455453H1
  unsure 23, 55, 74, 77, 86, 98, 104, 136-137, 139: a, t, c, g, or other
acgttatggacacactgagcagnttgagtcatgatgcagacgccgatgtgtcgangggctggcaattatctcantgnggtttgttnggtggccggcanctaaanaatgcccagaataggtgggcatgcttcgcaanncnttcaagttattac

SEQ ID NO: 4614 - DNA, 146 bp, Zea mays
  misc_feature: Incyte ID No: 700455455H1
  unsure 22-23, 29, 39, 74, 85-86, 97, 108, 113, 134, 141: a, t, c, g, or other
gtcagcttgagttcaagggctnncctgtntgtgccgaanagggccccctttgtacctgctttcgagaccaggantaaaactggannaacatcaagcncgatggtgcgnccgtntcgtcatcagtggaacaactngtgaggngctga

SEQ ID NO: 4615 - DNA, 272 bp, Zea mays
  misc_feature: Incyte ID No: 700455459H1
  unsure 28, 71, 107, 115, 135, 139, 158, 165, 175, 185, 199, 268: a, t, c, g, or other
cctcaaccaaattcaaggtcacagcggngaacctctcggctatcatatctggccgcggcaagggcgggaanggtctggggccaagggcggcgccaagcgtccagcgnaaggtgcntgcgcgacaacatccatggncatnaccaaagccggcgattcgnatgttgncgaggaagtngcggcgtcanagcacatctccggngctcatctacgaggatacccgcggcgtgcttcaagatctttcctcgagaacgtcatccgcgacgccgtnacct

SEQ ID NO: 4616 - DNA, 83 bp, Zea mays
  misc_feature: Incyte ID No: 700455460H1
  unsure 3, 81: a, t, c, g, or other
ccnatagttaagggaaatgggactatatttctagcgggtccaccacttgtaaaggctgctaacaggagaggagattatctnct

SEQ ID NO: 4617 - DNA, 156 bp, Zea mays
  misc_feature: Incyte ID No: 700455464H1
  unsure 15, 52, 59, 63-64, 68, 71, 81, 85-86, 91-92, 96: a, t, c, g, or other
gcgtgtcggtactantagctagcaggcagcaagatccgccaggcagcgcagnaggcttngcanngcangancgcaggatcnaganntctcnncggntccccctgcccgcgtgccaaaatgcagctcttccaaggagagaagccggcccacgatttc

SEQ ID NO: 4618 - DNA, 265 bp, Zea mays
  misc_feature: Incyte ID No: 700455467H1
  unsure 10, 30, 46-47, 68, 70, 85, 121, 155-156, 162-163, 174, 195, 217, 249: a, t, c, g, or other
ctggcgcccntgccatcgctgggaggcacncccctggtaccttcannaatcagctccagacctctttnancgagcctcgcctgcncatccttactgacccaaggacttgaccatcagccantccaaggagtctggctctgggggaacatcccganncattgnnttctgcgacantgactctcccatgcggtatgncgatatcggcatcccagccaanaacaaggggaggaacagcattggatgcctgtnctggcttttggccagg

SEQ ID NO: 4619 - DNA, 119 bp, Zea mays
  misc_feature: Incyte ID No: 700455470H1
  unsure 61, 73, 82-83, 90, 92, 98: a, t, c, g, or other
ccacttggtcggtagtctgtcactccttgttgctgccgagtttcttcttcctcctcatcancctgtataatgnaatcaagcnntaatagnanaataanagaagcgtttgaaatttccag

SEQ ID NO: 4620 - DNA, 268 bp, Zea mays
  misc_feature: Incyte ID No: 700455473H1
  unsure 4, 60, 62, 65, 73, 79, 125-126, 144, 163, 165, 168-169, 199, 201, 208,216, 222: a, t, c, g, or other
gaangagcatttggggtaatacttccagaagtgcggggtaggggaagaagaagctatcangnaanagcttgtngtctgngaacaagcttcagtaagttatctttgaatatgtagtatctatatgnnctaatgcgtgggctgganaccactcgaaggaatgttngngtnntgaaatggaggatctctaaagagcatctgntnccttgtngctgtacnaaagcnatggttgatgatacttcccacaccacaaatgggacacatggtctgt

SEQ ID NO: 4621 - DNA, 254 bp, Zea mays
  misc_feature: Incyte ID No: 700455478H1
  unsure 74, 80: a, t, c, g, or other
cgacaaacattggcttgatgatgatcagtggcctgtttgttaatggaccctatgctctgataacaaccgctgtntctgcngattttgggaactcacaaatctcttaaaggagattctcgcgcattggccacggtaaccgcaattatagatgggacaggatctcttggtgctgcactaggaccattcataacgggcttcatttcaagaaaaggatgggatttagtattcacaatgcttgcactctgtgcactggt

SEQ ID NO: 4622 - DNA, 251 bp, Zea mays
  misc_feature: Incyte ID No: 700455479H1
  unsure 13-14, 46: a, t, c, g, or other
aatctccagtcgnntatcaaggagcaagagatgtaaagccaatcgnagagtttgctctgtcacaggtcaaggccctcttagagataggttgagtggtaaggcatcagcagggtcaaatggcaagacctctggaggttcaagtgagaaaaatgaaccaagtgcatcagtagaattaaattcgcgtaacttcgatgaactcgttgtcaaaagcaaggacatttggattgtggaattctttgcgccatggtgtg

SEQ ID NO: 4623 - DNA, 143 bp, Zea mays
  misc_feature: Incyte ID No: 700455485H1
  unsure 4, 8, 46, 75, 80, 82, 88, 101, 103, 109, 113: a, t, c, g, or other
acanatanatttgggggaaaaactccaattgcggcgggtgggaaanaaagagagaaagaaattctttctccgttnttttncncgaatnctgaccgactcgngnccggcngctncgattcacgcccggaaccctagtacgaggt

SEQ ID NO: 4624 - DNA, 254 bp, Zea mays
  misc_feature: Incyte ID No: 700455486H1
  unsure 10, 80, 105, 242: a, t, c, g, or other
ggccattganggatcacatttatttgcatctgaaccatctgccacctgaggttctcaaggaaaggcttcctggtatttcngaaactgctgctattttgctggtgntgatgtcaccaaggagcccattccagttttgcctactgtggcactacgatatgggcggtcttccaacaaactaccatggggaggtagtggatatcaagggtgataatccagatgctgttgttcctggtctaatggcngctggtgaagca

SEQ ID NO: 4625 - DNA, 141 bp, Zea mays
  misc_feature: Incyte ID No: 700455487H1
  unsure 10, 61, 74, 92, 118, 129, 136: a, t, c, g, or other
caccgacgantgcaccggccgtcgctgccgcactacttcggcccctttgccggcgacgagnaccaccaggtagntgctaatggagatcgacngcctcagagaggagttgatcgaggtngctgaagaaangttcatnatctt

SEQ ID NO: 4626 - DNA, 259 bp, Zea mays
  misc_feature: Incyte ID No: 700455489H1
  unsure 24, 31, 37, 70, 107, 118, 129, 136, 158: a, t, c, g, or other
gcgcaatttaagcacatacttggngtgaaancagcancacagaatgcactaagcaatgttcctgtcaaancttatttcaagatcactggaacttccagaagagtttngcgcctagatnctgcatggtcncgttgcngcacaattgggaacatacttgntcaaggtcactgtggctcttgttgggcttttggtgctgtggagtgcctccaggaccgtttttgcattcacctcaacatgagcattttactttcagtcaatg

SEQ ID NO: 4627 - DNA, 135 bp, Zea mays
  misc_feature: Incyte ID No: 700455490H1
  unsure 60, 70-71, 101, 104-105, 122, 132: a, t, c, g, or other
cccgatcccgatccagcgaggcggcgaccctccctcctccccttggcttcgctcgtccanccctgacganncgcatccccgttcagtcatggtcagcgggnagnngagtggaggcgcggtgngtgcgctgtnccc

SEQ ID NO: 4628 - DNA, 253 bp, Zea mays
  misc_feature: Incyte ID No: 700455492H1
  unsure 152, 191, 202, 206, 222, 225: a, t, c, g, or other
gcgcacagcacacgaacacacaccgcgcccagctccgaggtgatcttccggcggccggcgagatgagccgtggcacaggcgcgggctatgaccgccacatcaccatcttctcccccgagggacgcctgtaccaagtcgagtacgcgttcaangcggtgaagtcggcgggtgtcacgtcgatcggcgtccgnggcgcggactnccgnctgcgttgttacgcanaanaaagtcccggataagttgctggatcaga

SEQ ID NO: 4629 - DNA, 253 bp, Zea mays
  misc_feature: Incyte ID No: 700455493H1
  unsure 70, 240: a, t, c, g, or other
gtacatcaagcacatggtgaccaacttggggctcaacacctggggctttgtgctctacaacaatcttgcnctcgctgctaatggcaccggtgtttgggtttctgacaggggagcacttgtccgtcttcagagcttttgagtcaagggggcagagttggtttgagcttgatgcctttgtggcggttgcgttgtcctgcgtctttggtctgctcatcagcttctttggtttcgctgcaaggnaagcgatctctgc

SEQ ID NO: 4630 - DNA, 251 bp, Zea mays
  misc_feature: Incyte ID No: 700455494H1
  unsure 22-23, 29, 64, 75-76, 113, 193, 199, 234, 238, 247: a, t, c, g, or other
ggtggctgttgtcctcatcggnnatctcngcgacgtcctactcgagcgagatctcgctgcagtnccttcgagatnngggtggttccgtgttgtgatcgtcgggtgtaacaacntgcaggagaactaatatgttgcaggaggagattgacaaggagattgaggacaagaagacagagctggagcccaaggtcgnggaggnctacgaagcatctcctcctgaggtcaaggctccancccnaggataagnagcc

SEQ ID NO: 4631 - DNA, 254 bp, Zea mays
  misc_feature: Incyte ID No: 700455495H1
  unsure 50, 55, 78, 90, 96, 103, 165, 176, 186, 190, 192, 235: a, t, c, g, or other
ctcccgttcttcccttgcttccccgtcgcgctgttcaacgttcaaacccntacanctcctcctcccttggccgcgcantcgccattgaangagccnctctcantctacccctcccttaaatccctcgtctccccgcgtccttctccccatcaacgcttcattcgntccagtctcancgaatccaantcananccagccagacagggcgggagatctccaagaagctatcttggantccgagaacaccttgcatt

SEQ ID NO: 4632 - DNA, 263 bp, Zea mays
  misc_feature: Incyte ID No: 700455496H1
  unsure 51, 174: a, t, c, g, or other
caagactccgaggaggataccgtcatggagccgcatcagtcgagagaactnctttggagtctctctcggaagagatctctggcggtttgctgcttcgtccatggcaggcaagggcgctggctcttgttgtcggcggcaccaccaacgaactctttctcaggcatgttcggcgcngttctcatgacggaagtgagagtgagtcagaaaccattgaccttaattcctgggaccaggagtggagggcctctaatgaggacagcgtc

SEQ ID NO: 4633 - DNA, 144 bp, Zea mays
  misc_feature: Incyte ID No: 700455503H1
  unsure 20, 57, 68, 118: a, t, c, g, or other
tgctttcactctccagggcnccactcccacctcgccgccgcagccatggcgatcacngcgccaaactncccgacattccttcggcgagcgccagtccggccaggacgttccggcacgncagaaagtgatgggtttgcggggccg

SEQ ID NO: 4634 - DNA, 138 bp, Zea mays
  misc_feature: Incyte ID No: 700455504H1
  unsure 10, 22, 30, 33, 90, 92, 124, 131-132: a, t, c, g, or other
caaaccttcnggcttctgcacngctctccnccncccctcaaacgaagctgactggtgcctcggccaccgcagcagcctggccctgccccngnccccgggcgtggtgtcaggtctcaggtgtggnggcgctnnctacta

SEQ ID NO: 4635 - DNA, 215 bp, Zea mays
  misc_feature: Incyte ID No: 700455505H1
  unsure 44, 114-136, 139: a, t, c, g, or other
cttccgcttccgctccgtcgctcgcctcacgcctccggcgcaanctccaccatggccccgaagaaggagaaggccccgccgccatcgtccaagccggccaagtccggaggcggnnnnnnnnnnnnnnnnnnnnnnngcnagggtaagcagaaggagaaggtcaaaaagctgtgctctttcgaacaaggcccacttacgataagtgctctccgagg

SEQ ID NO: 4636 - DNA, 108 bp, Zea mays
  misc_feature: Incyte ID No: 700455508H1
  unsure 5, 17, 47, 53, 60, 85, 97, 105: a, t, c, g, or other
ttatnttttgataaganagatgtgtgatgcgtatgtttgatgcaganccactnaagttancaaaatgcggacttatattttgggnaatgcctcgatntgtgtttntcc

SEQ ID NO: 4637 - DNA, 100 bp, Zea mays
  misc_feature: Incyte ID No: 700455510H1
  unsure 6, 22, 43, 69, 74, 96, 99: a, t, c, g, or other
cttttnttgatgtcctcaaggngggaggcgtcctccctggcantcaaggttgaccagggcaccattganggttnttggcactgataaggagaccanccnc

SEQ ID NO: 4638 - DNA, 136 bp, Zea mays
  misc_feature: Incyte ID No: 700455512H1
  unsure 20, 24: a, t, c, g, or other
ctgtacagagattttgtcangggntttccctattgtctcaattgaggacccttttgatcaggatgaactggagttcatgggcatcattgcagtcctcagttgatatccaaattgtgggtgatgatttactcgtccc

SEQ ID NO: 4639 - DNA, 158 bp, Zea mays
  misc_feature: Incyte ID No: 700455517H1
  unsure 61: a, t, c, g, or other
ccgtcctccagcactccagctgcatcgacgaggaccgccgtagcgatttgcgaacaagggnacgggagaggaacccgaggaaggcgaaaatgatctaccgcaactggtcgctgctctcgtcccacagtcgtctttggggcgggcgtcgccaccggcgg

SEQ ID NO: 4640 - DNA, 134 bp, Zea mays
  misc_feature: Incyte ID No: 700455518H1
  unsure 64, 86, 112: a, t, c, g, or other
tatctctcagccgaaaggttgaggagtcagagaagttgagtgatatgaaagttgctgctgctanggctcaagtggaagccatcagngccagtgagaatgaggcaatcaaganacttagaaactgcccgcaagga

SEQ ID NO: 4641 - DNA, 156 bp, Zea mays
  misc_feature: Incyte ID No: 700455522H1
  unsure 32, 43, 67, 72: a, t, c, g, or other
ccctggcccagtatttctgatagcgctaaggntctggtccgcnatatgcttactcgggatcctaaanagagntttagtgctcatgaggttctctgccacccatggattgttgatgatgccgtggcgcctgataagcctattgattctgctgttctc

SEQ ID NO: 4642 - DNA, 136 bp, Zea mays
  misc_feature: Incyte ID No: 700455523H1
  unsure 49: a, t, c, g, or other
gcattttctacgatcacttcttcgactgggggttcaaggaacgaaatcnccgccctggtggcggtgcgcaagcgcaatggcatcacgccgacgagcgagctcaccatcctcgagcacgacggtgactcctacgtgg

SEQ ID NO: 4643 - DNA, 241 bp, Zea mays
  misc_feature: Incyte ID No: 700455525H1
  unsure 7, 37-38, 58, 81, 154, 181, 185: a, t, c, g, or other
caaaganttccctcccctagccgccgccgccgctacnnctccctgagaggtgccgggnccgaggaactggccgagttctangtagagaatcggttttgcttgtctcagcacggggtctgctgcgtctggtggtggtgaaggggagaaattcgtnagatctgttccggatcaggcgtgcganctcnggaatcaggggtttcacacatagcttcgtcgatttgaatttgatgtataatggagt

SEQ ID NO: 4644 - DNA, 241 bp, Zea mays
  misc_feature: Incyte ID No: 700455527H1
  unsure 108, 135-164: a, t, c, g, or other
gtctcggggaggagagagaaagtcagatccgtgttccgtgtccgcgtccagtgtgtccgctactccgctccccctcagtcctcagttcctcacctagcggtagcgtancgcgcgggagacgtagatggcggcttnnnnnnnnnnnnnnnnnnnnnnnnnnnnnntgacgccgaacagaggggacggtgatcgcgatccacagcctggaggagtggagcatccagatcgaggaggccaacag

SEQ ID NO: 4645 - DNA, 211 bp, Zea mays
  misc_feature: Incyte ID No: 700455531H1
  unsure 13: a, t, c, g, or other
caaatactttggntgtgagcttggtgcacagtccaaatttgatgagaagacagggatttccttggttaatggggctcatgatactgcaaagctggctggtctcctgaggtattcatcaagaagtatgtccagtgttatgggtgtgggaatcctgagactgagattctcatatcaaagactcagatgctatcactgaaatgtgcagcctgtg

SEQ ID NO: 4646 - DNA, 156 bp, Zea mays
  misc_feature: Incyte ID No: 700455533H1
  unsure 8, 20, 29, 45-46, 50, 64, 134, 144: a, t, c, g, or other
gggacatnagggacgttaangagcttcangatgttgagacattcnnacantgcttaattgatgnggatttgctgccaccacagcacgatgattatcacatgatgttaaggttcctaaaagcacggaaatttgangtttgagaanagctaagagtat

SEQ ID NO: 4647 - DNA, 156 bp, Zea mays
  misc_feature: Incyte ID No: 700455534H1
  unsure 2, 155: a, t, c, g, or other
tngtagctggctttgatcaagaagctgcagctgcagtcatggcacgcttggtgtcatttaagatggaaactgaggttgattttgacccagtaaggtggcttgatcgagctttgataacgtttatgctccaaaatttggagattaatccagaaggng

SEQ ID NO: 4648 - DNA, 147 bp, Zea mays
  misc_feature: Incyte ID No: 700455535H1
  unsure 28, 41, 43, 50, 55, 61, 136, 145: a, t, c, g, or other
tgtagttctgttcctccccactcactcntgagcttcctacncngcgcggntcccntctacnctgatcctcctttggcttcgcggttcatggcgatgtggagggccgccgctaggcagctggtcgaccgggcggctncggctcaangg

SEQ ID NO: 4649 - DNA, 148 bp, Zea mays
  misc_feature: Incyte ID No: 700455537H1
  unsure 3, 24-26, 30, 33, 38, 44, 48, 71, 74, 77, 104, 141: a, t, c, g, or other
canaaagagtcaaccttgccactnnngcanggncaagncttgcnagcntgcccttgctaatgccatcttcngtnctntagcttttgtgcttggtgcggttcacntcactggtttctggttttcttggaatgaagatagcanattatgc

SEQ ID NO: 4650 - DNA, 110 bp, Zea mays
  misc_feature: Incyte ID No: 700455539H1
  unsure 5, 14, 16, 20, 43-44, 52, 56, 59-61, 105: a, t, c, g, or other
ttatnttttgatangncagntgtgtgatgcgttgtttgatgcnnaacactangttncannntgcggactatattttgggaaatgcatcgatatgtgtttatgtgnaaaac

SEQ ID NO: 4651 - DNA, 225 bp, Zea mays
  misc_feature: Incyte ID No: 700455542H1
gccaaacagatctcctcgtcgtcgcctcgctgtctcctccgccgttgcctgcgatcccgatcatggagggcgacagtaccaacctcgacgcggctatagagtcgctcctgaacgtggagaagcagatgaggctggccggcgatgtcgccggcacgcggaaggccgtcatcgacatcgtcgagctctgtacaaggccggcgcgtggaagacgctaaacgaccagat

SEQ ID NO: 4652 - DNA, 129 bp, Zea mays
  misc_feature: Incyte ID No: 700455543H1
  unsure 14, 24, 64: a, t, c, g, or other
cggaatcgtacgangatgcatctngtgaacatgcggcacacattattcttcgtctcgatttatnagtgccgcatgttcacaagatgcatcactaataaatcgagacgaagaataatgtgttttcaaaaa

SEQ ID NO: 4653 - DNA, 237 bp, Zea mays
  misc_feature: Incyte ID No: 700455547H1
  unsure 61, 142: a, t, c, g, or other
gtcttcgtcgaccccttcgcaaggcctcggttccatccttcgccggaggaacacgcccgtncaacaggacttgatctactactcactagcggtgtagaggcgaagagaagaacttgaccatgagcagcataggcacaggttnagatttgtctgtcacgactttctccccagatggtcgtgtcttccaggtcgagtatgccaccaaggccgtcgacaacagcgggatgttgttgggat

SEQ ID NO: 4654 - DNA, 153 bp, Zea mays
  misc_feature: Incyte ID No: 700455548H1
  unsure 21: a, t, c, g, or other
tcatcgccgcagtgcgcgctncctacaacccatcgctcaccaccacctgctcctccagcggcggcgtccagggtgaacccgaatccccaacaccatggcggggggcaagatccagaagaagcgccacggcgcggcgggaggcgcccggctgca

SEQ ID NO: 4655 - DNA, 150 bp, Zea mays
  misc_feature: Incyte ID No: 700455552H1
  unsure 6, 8, 14, 22-23, 26, 31, 34, 43, 65, 91, 114, 122, 139: a, t, c, g, or other
cttgananagcatntggctgcnngcngtgtnttnggccttgcnccacaagaggggagggtttctnctatgatgcttactacaatgatcagncattgaatgaggagcatttggtntcattganaaccaagctaaaaaagngctgttgcggc

SEQ ID NO: 4656 - DNA, 140 bp, Zea mays
  misc_feature: Incyte ID No: 700455554H1
gttcaccaatacagagctctggagatccaggtcctagaactgctgacccttccggcctaatttatcctccaatagcaccgattggttctgatgatctctaccctgggcctggtgcaggcttctaccctcacagtggcatt

SEQ ID NO: 4657 - DNA, 150 bp, Zea mays
  misc_feature: Incyte ID No: 700455555H1
  unsure 21, 31, 71, 99, 143: a, t, c, g, or other
cagacaccgagcccgactgcncgaccccganccggcgatccgtctccttcctttccttcgttctgccgganccgatcactcgtcaaccatggcggcggnagcaggcggaggagcggtgcgtgctctgtcccagaaggagcggnacataca

SEQ ID NO: 4658 - DNA, 224 bp, Zea mays
  misc_feature: Incyte ID No: 700455558H1
  unsure 24: a, t, c, g, or other
ctccgttgctcgcctcgggtcaancccctaagcagggagttgatttatccgctgccagccatgagtaagttgcagtctgagtctgtcaaggatgccatctcccagattgttggggatgccaaggagaagaataggaagttcactgagactgtggaacttcagattggtctgaagaattatgatccacagaaggacaagcgtttcatggctctgttaagttgccc

SEQ ID NO: 4659 - DNA, 151 bp, Zea mays
  misc_feature: Incyte ID No: 700455559H1
  unsure 26, 56, 60, 66, 74, 81, 86, 94, 113, 140: a, t, c, g, or other
ggtgaccttgcgtacgtacgtcgtancgggctcgtccagctcgctcgccaccgccntggncccgtncaagtacngcccgtncgagngccttcancgccccgtactggaccacnaactccggcgcccccgtgtggaataangaacagctcct

SEQ ID NO: 4660 - DNA, 154 bp, Zea mays
  misc_feature: Incyte ID No: 700455560H1
  unsure 2: a, t, c, g, or other
gnagctgttactgtagagagctttctggcgtggagagaccgatttgaagctgagttggccttacagcgtgctaagtaaactttctattttgtttacatatcaagtttttctcgatgatcacatgggaatctttgtttactgtgatatctcaatc

SEQ ID NO: 4661 - DNA, 274 bp, Zea mays
  misc_feature: Incyte ID No: 700455562H1
  unsure 2, 4, 6, 46, 69, 102, 116-117, 146, 179, 243, 247: a, t, c, g, or other
cngngncggaaaccagagacgggccagagcataccccctcctaccnccatgaaactcgcggtcaccctncaccctggtcacactggctcctctgctgcagcnccgcttctgcaganntctgcccgagctttcagcgtgtacatcgnaaccctcctcatggacacaccctccagttatgnggctgccatggaacttttcagcctgatcaagactgagggaagcaggggctcagctgaagaagtngtgnccacctcccccaaagcccagagaaagc

SEQ ID NO: 4662 - DNA, 275 bp, Zea mays
  misc_feature: Incyte ID No: 700455564H1
  unsure 10, 20, 24, 90, 196, 236, 242, 266: a, t, c, g, or other
gggaaggtanaagggaaggnagtncagttcagtatgtcatttctttggatatcaggctcgaggatctacaccatcaaatttcgactgtgnctatgcttatgctcttggacgtatctccctgcatatgattgcagttggattgactggctacatggcaactgtggctaatctgaaagaccctgttgacaaatggagntgtgctgctgctccttaactgcgatgatgagtgtgaagangcattnacgtggcctggagcatccctatanggaggcttc

SEQ ID NO: 4663 - DNA, 127 bp, Zea mays
  misc_feature: Incyte ID No: 700455565H1
  unsure 19-20, 99: a, t, c, g, or other
ctcgcctagccgccggagnngcgccgctcgctcaggaggacagccatggcgccggagccggaggatgatattatgaacgagaagaatccccgcccgctncgacgaggatgacatcgcgctcctcaaa

SEQ ID NO: 4664 - DNA, 138 bp, Zea mays
  misc_feature: Incyte ID No: 700455569H1
  unsure 17, 22, 73, 120: a, t, c, g, or other
ctgtttccgcgcgcganatcgncgccccgggtgggctctagatcccgatggcctcgcgccgccgcaccctgcncaaggtcatcatcctacggcgacagcggggttgggaagacgtctttnatgaaaccaatatgtgaa

SEQ ID NO: 4665 - DNA, 270 bp, Zea mays
  misc_feature: Incyte ID No: 700455574H1
  unsure 20, 51: a, t, c, g, or other
gcttctcgagaagctgcgtnctgcttcctgggatcatgctgtcaaagatcnggaagatctaaaagtctttgcgaaagattctggttctcctgaagctaatgatttgactcactgggaccttaccttctggagtgaacgactgagagagtctaaatatgatatcaatgaggaagagctgcgcccttattttgcactacccaaggttatggatggcctcttcatctggcacataagctttttgaagttatgttgaacctgcagatgggctgg

SEQ ID NO: 4666 - DNA, 145 bp, Zea mays
  misc_feature: Incyte ID No: 700455575H1
  unsure 12, 54: a, t, c, g, or other
gcttctcgagangctgcgtgctgcttcctgggatcatgctgtcaaagatatggnagatctaaaagtctttgcgaaagattctggttctcctgaagctaatgatttgactcactgggaccttaccttctggagtgaacgactgagc

SEQ ID NO: 4667 - DNA, 147 bp, Zea mays
  misc_feature: Incyte ID No: 700455576H1
cggagaccgagcgaggcaggcaacccaccaccgagaggcagggacaggaacaggaagccggagggaaagatgtacgtacggtgttcagcggcgatgagacggcccccttcttcggcttcctcggcgccgccgccgccctcgtcttct

SEQ ID NO: 4668 - DNA, 164 bp, Zea mays
  misc_feature: Incyte ID No: 700455577H1
  unsure 150: a, t, c, g, or other
gggattcggtctctactaggattaggggtgcttcatttcatccgatccccaacgacttgaacctgattctgatctcgacgacgatgcggaagcgggatctgggcatcctgctgctcgccgccttcgccatcttcttctccctccaccacnaaggcgattctcct

SEQ ID NO: 4669 - DNA, 266 bp, Zea mays
  misc_feature: Incyte ID No: 700455578H1
  unsure 28, 216, 232, 239, 244, 247: a, t, c, g, or other
cactttgaagaagccatgcgctttgccnccgttctgtcagtgacaatgacattccggaagtatgagatgtttgcccagacccttcagcagagtcggggctttggcagcttcagattcccttcagggaaccagggtggagctggccccagtcagggcagtggaggcggcacaggtggccagtgtatacacagaagacatgatgatgactgtatggcnaagtggtggtggccancgtgcantgagnggntgctggacttgttccctgg

SEQ ID NO: 4670 - DNA, 200 bp, Zea mays
  misc_feature: Incyte ID No: 700455579H1
gtcggattccacactcgccggcgacaaccgccgcgcccgatccgtctgctaggtcttgcacctccgggctctgggcatggctgccgaagctggcccaatctccaaggtcctcatcgtacgtagcgatgcagacggaggcgatgccgctcgtccacaagttcaagctcgtcgaggcgcccgcccacgaatccacatttcct

SEQ ID NO: 4671 - DNA, 137 bp, Zea mays
  misc_feature: Incyte ID No: 700455581H1
ctacaaggagatcctaccaagggcggagtacttctcccaggcactttacacctttcgacatcggtcaaaacgacatcacctcaagctactttgttaacaataccaccgaagaagtcgaagccataatccctgatctg

SEQ ID NO: 4672 - DNA, 143 bp, Zea mays
  misc_feature: Incyte ID No: 700455582H1
gcttctccccacctttggtcaggcaggctcaggcaaagggggcggccaacaaggacgagcgatggcgaccaaggtcatctgcttccttgtgctcgcatccctgctcctcgccgtcgcctttcccgtggtaagatcgctgcgct

SEQ ID NO: 4673 - DNA, 135 bp, Zea mays
  misc_feature: Incyte ID No: 700455584H1
  unsure 10, 12, 14, 69, 89, 114: a, t, c, g, or other
gcaacttatncngngatatgatcttgacccagctgcaaaggcggcagcgggcaacagttttggcatcanagttgggtgcggattctggnctgagagtctttttgggagatgaancaagcagggatgcagcaatag

SEQ ID NO: 4674 - DNA, 146 bp, Zea mays
  misc_feature: Incyte ID No: 700455585H1
  unsure 62, 90, 137: a, t, c, g, or other
catccattttggtatctgcactgagttactgtgctgctgagaaaattcttaccgcaggtgtnacagttccatgctcaactagtgaaagtnggatatgtctcatctatatccactggcaacttgctgatcagtttttnttcacgatg

SEQ ID NO: 4675 - DNA, 155 bp, Zea mays
  misc_feature: Incyte ID No: 700455589H1
  unsure 4, 15, 23, 28, 89, 131, 142: a, t, c, g, or other
gganattctttttgnacaagatnatgangagcaatcagttgccactttaatattggattcccttatacagtgtccgatagacaccaggnagcaactagcagagaatttggtagtcataggtggcacttctntgttgccaggntttctccacagat

SEQ ID NO: 4676 - DNA, 225 bp, Zea mays
  misc_feature: Incyte ID No: 700455590H1
  unsure 26, 29, 34, 40, 43, 48, 64, 71, 73, 89, 99, 115, 126, 139, 142, 155,157, 171, 181, 195, 203-204, 219-220, 223: a, t, c, g, or other
ctcgcctcggccgctctcggcgcttntgnggtgngtgcangcncgggngctgatgcgagaagcnttcgccngncctagcgctagccggntgccgagctnggtgcgggcgcgagcnagtcgacgggnagacaagggtgcnggnattatgagtgaancngggacacactgtanaagtcactancctctcgaggcagngtatctgnnagtgatcttcatgcnntcntt

SEQ ID NO: 4677 - DNA, 99 bp, Zea mays
  misc_feature: Incyte ID No: 700455593H1
  unsure 4, 7-8, 14, 44, 98: a, t, c, g, or other
gganaanngaagcnatgcgcattattctaatgctttagagatancaatcatggttacaacataccagacgaacatgtttcttttaacttctgaaaaanc

SEQ ID NO: 4678 - DNA, 272 bp, Zea mays
  misc_feature: Incyte ID No: 700455594H1
  unsure 23, 31, 37, 69, 95, 101, 116, 120, 182, 190, 197, 228, 230, 253, 265,268: a, t, c, g, or other
ggaatgtatattgttaagtcacngttatcangggacncataaaagcagaatcataaaactggactgcanccatcatcacagtaacccgagtctangcatgncaggtcttcctacantctnctcttggagtcacaaccaagactccaaaaaaccaacgaagtcccttcaatgtgagtaaaggnaaacagcntcaagcnatgacatttttaacaagtgaatattcaaggnangcaacagtaagccacagtcaganaaatcaatacanaantctt

SEQ ID NO: 4679 - DNA, 132 bp, Zea mays
  misc_feature: Incyte ID No: 700455596H1
  unsure 16: a, t, c, g, or other
gcgacttccaggtggngcgctacgtgtacaagcgccgcactgatggtatctaacattattaaccttggaaagacctgggacaagcttcagttggccgccaaggtcatcgttgccttgagaatccgcagacat

SEQ ID NO: 4680 - DNA, 285 bp, Zea mays
  misc_feature: Incyte ID No: 700455601H1
  unsure 53, 73, 156, 240, 244, 251, 255, 269, 283: a, t, c, g, or other
attgccacagctgtcatcacgttatttaatgaacctagtgctgaagacagtanaaagggtccattgacagttnccacagaaaaaagcccagaacatcatggagtcctttgaaaatccatttaggatgtttctgccctcactgggacaccgtgctcncgtctctcaggcagcgaagttcgatccatcaaccaaaatctatgaaattcagcaaccgttggaagctggcccaggtacaatacnaaangactctnaagnagctgtgaagaagnaggcagtggagcanac

SEQ ID NO: 4681 - DNA, 224 bp, Zea mays
  misc_feature: Incyte ID No: 700455604H1
  unsure 74-90: a, t, c, g, or other
agcgtcgtctcctccggtgaggtgatgaacagaggagaattccagacctcccttgtccagcagatgatctggannnnnnnnnnnnnnnnnaataccacagcggcaggcagcagcaacatcatgagcagcggcttcaagcagtcttgccatgaggatcaacaagaggcctcccgcaacctgcagctgctgccctccctatcgtctccgtcgtcgctgctcttctc

SEQ ID NO: 4682 - DNA, 274 bp, Zea mays
  misc_feature: Incyte ID No: 700455606H1
ggaaaaccacctgtacttattgagaaagatgaaagcctggataagtttgacccagcaaaactgaagaaacttcgcccaagtttcaaggagaatggtggtaccgttacagctggaaatgcttctagtataagtgatggggcggctgcattagttttggtgagtgggcagaaggctcaagagcttggcctgcaagtcctgcaaggatcagaggatatgcagatgcagctcaagctccggaactttttacaaccaccccagcattgcgataccaagg

SEQ ID NO: 4683 - DNA, 278 bp, Zea mays
  misc_feature: Incyte ID No: 700455607H1
  unsure 11-12, 15, 21-22, 60, 73, 82, 127, 141, 150, 162, 167, 178, 214-215,225, 232-233, 239, 243, 264, 267, 269, 274, 277: a, t, c, g, or other
ggcacagctanntanaggggnngacaagaggccaaatatagtaatggaggtgccaaatgnttatgtgcacttngcactagangactttgttagacaattactaataaacttgccataggtattacancagaagtgcttcantcattcacntgtgttccgtgncattngaggttgctcnagattgtttaagacagcttattttaaatgtagcaannataggagatntgttaanngcttgnccantaacttgctgctaaattcccntgncntgatnacnc

SEQ ID NO: 4684 - DNA, 271 bp, Zea mays
  misc_feature: Incyte ID No: 700455608H1
  unsure 182: a, t, c, g, or other
gccagattaccgatctgagtggtgtccactgatccatcaagtgcactgatcttaggttttacaatagtgatgttatccccaggagcaatttggtgaggtttagactcttggagagggaggctgcattatccctaaactgttatttccaatctcgtagctaattggttagtcctagaaaggcngactggaccccaggtaagaagtggggtcttttgggaaagggctgttaccaattttgtttcagagtcaaacctgatctgaatcctcccaa

SEQ ID NO: 4685 - DNA, 275 bp, Zea mays
  misc_feature: Incyte ID No: 700455609H1
  unsure 23, 35, 43, 63, 70, 81-82, 118, 129, 133, 142, 157, 191, 193, 212,215-217, 246, 259, 269: a, t, c, g, or other
ctttcaggcatagagacagccanagagacagaganctctactnccaattacttctgttaatgntttagangcactgtcatnncctcttaagctagcatctgactcattatcattaggnactgctggatncgtnaatttattnatcagtgtgtattgngcactgctgtgctgtgctaggtactcaggaagcnangataaagacacagccccanctnnnaagacgctcagacccatatacaattacangaagtaggtaganggtcatggcngtacct

SEQ ID NO: 4686 - DNA, 274 bp, Zea mays
  misc_feature: Incyte ID No: 700455610H1
gcgcgttcgacccggtagcccgaaaccgcccatatatcttgccaactttctgcgacacggtggaggcgtggagctaactacccccgcgctggctcgccaccgccgccgcagcaggcgtgggaatctgggcagcgccccgcggagaagaggaggcagcgcgctctccgtccgccatggcgggctcttccgaccccgacaagctcatgagcaaagccgacaaactaacaaaattgagttttacaagatggaatgctgattggaaaagcgctacctc

SEQ ID NO: 4687 - DNA, 273 bp, Zea mays
  misc_feature: Incyte ID No: 700455611H1
  unsure 4, 45, 121-142: a, t, c, g, or other
ggcngccaccgagggcggcggctgcgactgcaacacctgcaagtncggcaccagctgcggctgctcctgctgcagctgcaactgagctggcccggcccggcgatggcgcacgagagtcgannnnnnnnnnnnnnnnnnnnnncgtataaatataatagcggcgtccagtaaataagatcctgtcaactgcacccgccattatccatggtcgctcgctcctcgcctgcgtctcctggtcctggggttcgtctgaacgtcctcgcggcttcacga

SEQ ID NO: 4688 - DNA, 270 bp, Zea mays
  misc_feature: Incyte ID No: 700455612H1
taggcactcatcaaggaacattatttcttggaattgtataattcttgcacacttgctgcatggttctccaagtgaagcactggatcgcttttgtgagatgaaacaagaaggcgtgctgccagatcatacaactttgactgccgtaatcaaggcctatggctccagggaaaggtatctgaggcgaaacggatatttcacaatatgacccacgatcacaacattactccagatttagatcattacacagctatagttgatctcctggccgct

SEQ ID NO: 4689 - DNA, 272 bp, Zea mays
  misc_feature: Incyte ID No: 700455613H1
  unsure 215: a, t, c, g, or other
gttgaaggtagatcggaaaggtatgcagttcagaaagatgagagcttgtcagaaataaggacgcagctccttcagattgaaaatcagcaaagcagtttactggatcttctccagaaatttatggggaagtccgagaacggtatgcattctttggagacaagagtgcatgggctggagatggctttggatgagatctctcgtgatttggccttctnctcgggaaggatgtcaagcagagagcctgatgcaaagacgtgctgcattccgagccc

SEQ ID NO: 4690 - DNA, 272 bp, Zea mays
  misc_feature: Incyte ID No: 700455616H1
  unsure 164-190: a, t, c, g, or other
gtcgcctcgctccgcgcggaggtcgaacgcctcgatgctgttctcaggatcgagaagggcgagcacgagctggacaagcagagacacgagaaggtcgccaaggaggtggatgccgtgcgccaggagaagctcaagctagaggaggagattcagagccctgaagnnnnnnnnnnnnnnnnnnnnnnnnnnnaaggagagggaagtgcgccggcttctgaggccccgaaggaaggggaagtcgctggtggggatggcgtggctgcggctgccgg

SEQ ID NO: 4691 - DNA, 280 bp, Zea mays
  misc_feature: Incyte ID No: 700455617H1
  unsure 9: a, t, c, g, or other
caaaccttnaagggatttgaggcagctattgcagcaggggcaaaagaaatcgcaatatttgcatcagcttctgaaggattttccaagtcaaacataaactgcaccattaaagagagcattgcccgttataatgacgttgctcttgctgcgaaagagaaagaaattcctgtccgagggtacgtttcttgtgtggttggatgcccagtagatggaccagtgccaccttcaaacgtagcttatgtagcgaaagaactttatgacatgggctgctatgaggttt

SEQ ID NO: 4692 - DNA, 266 bp, Zea mays
  misc_feature: Incyte ID No: 700455618H1
gaagtataaagagggcctcactagggaagagggaatacaactggtgtcagaagcaatatgtgcaggtatcttcaatgacttgggtagtggaagcaatgtggatgtctgcgtgataaccaaggggaagacagaatacttgagaaaccaccagttgccgaatcccagaacttatgttagttcaaagggatatagcttcaccaaggggcagactgaggtgttgtccgcaaagatcacactctcaagcagaaggttgaggtcactgaggg

SEQ ID NO: 4693 - DNA, 275 bp, Zea mays
  misc_feature: Incyte ID No: 700455619H1
caccagcctcctcgcgcacccggtcccgcttgcctttccccacctactcgccgtcgcggtgccgtgcgccggtgctgttcagtctagggtttcggccctcgcccgccgatccgtccccccgccggccatgtcgaagcaaggagggaaggccaagccgctgaaggcgcccaaggtcgacaagaaggagtacgacgagagtgatcttgcttatttgcagaagaagaaagatgaggaaaaggcatgaaggagctgaaggccaaggcacagaagggcgc

SEQ ID NO: 4694 - DNA, 276 bp, Zea mays
  misc_feature: Incyte ID No: 700455621H1
  unsure 27, 38, 232, 240, 256, 261, 263, 272-273: a, t, c, g, or other
aaaaaaaaaacaaaaagggtaccggangcggcgaaagntcgccccccgccgctctcgcatcgtctccggagcgcacgtcagatcaggtgcgccgcgcccccctcgcctaagctgcgacgaccatccatcgaacaggaaggatgacggctccatggatctcccggccaagggcgggttcagcttcgacctgtgccgccggaacaacatgctggaaaaagaacggggtcaaagntccggganttcaggaagaccgggncaacntngttgggccnnttt

SEQ ID NO: 4695 - DNA, 272 bp, Zea mays
  misc_feature: Incyte ID No: 700455622H1
  unsure 142, 238: a, t, c, g, or other
acttcacacgtcatattctcaagggtcttgcttttttacatagccaaaagattatgcatagggatatcaaaggggcaaatttgttagttgatattaacggtgtagtgaaattggctgacttcggaatggcaaagcatttgantactgcagctcctaatctttcattgaagggaacaccatactggatggctcctgaggttgttcgggctacactcgataaaagtgcaggttatgatcntgcgttgatatttggagccctggctgcacattca

SEQ ID NO: 4696 - DNA, 276 bp, Zea mays
  misc_feature: Incyte ID No: 700455623H1
  unsure 206, 258: a, t, c, g, or other
tgtgaccctccctcagccgcgtcgcgtcgcatcctacgatccaaagctctctctggctacgcagccatggcgaagaactacccgaccgtgagcgccgagtacagcgaggctgtggagaaggccaggcgcaagtccgagccctcatcgccgagaagagctgcgccccgctcatgctccgccttcgcgtggcactccgcggggacgtncgactgttcgtcgaggaaccggcggtccattcggcacgatgaagcatcagtncggaattggctcaggcgc

SEQ ID NO: 4697 - DNA, 267 bp, Zea mays
  misc_feature: Incyte ID No: 700455627H1
cttcaaactcctattcaaggttggatgatggcaattgtgatggctcttttgagtggttttgctggggtgtatacagaagctatcattaaaaaacggccatcaagaaacatcaacgtgcagaacttttggctatacatatttggggtgatcttcaatctagttgcaatttgtgttcaggattatgatgcagtcatgaataaaggctttttccatgggtattcatcatcacagttttgatgattctgaaccacgcactgagtggattgc

SEQ ID NO: 4698 - DNA, 266 bp, Zea mays
  misc_feature: Incyte ID No: 700455628H1
  unsure 4, 11, 15, 223: a, t, c, g, or other
tgtntaaatgncaanatgtacttaaatgagttacttagaatgccataaaattgcagtttcatgtatgtatataatacatgctcatgtatatttagttacgtataatgctttctgagtgagttttactcttaaatcatttggttaaatcatttggctgctgtttactcccttctgtagtttttaattaaaaactttaaagataagtctacattaaacaatgatncacatctaaagcttatctttgtgtaatctaagtatatgtgaga

SEQ ID NO: 4699 - DNA, 270 bp, Zea mays
  misc_feature: Incyte ID No: 700455630H1
  unsure 65: a, t, c, g, or other
gctaaacaagaagcagctgccagaagggtccatccaacactgcatctgcctacccccgcgcagcncacggcacagatcgctgcaccagctacaagccaaccgcagcaaccttcctttccgtccgctgcgacttcctcaagcgcttctcaacctttagcactccggcttccgctccatcctcgtctagtctgtttgcaactccaacaactccagctccatcgggcaacctttttggtgcgccaggatcggctcagttgaccacaccattgg

SEQ ID NO: 4700 - DNA, 243 bp, Zea mays
  misc_feature: Incyte ID No: 700455631H1
  unsure 17, 33, 167-188: a, t, c, g, or other
ggttgagttctggatcngccttatcctcacctncttcggctacctccccggcatcatctacgccgtctgggccatcaccaagtagccggccggtgcgttagatgcaatgcgcgcgcagggtgatctcgtggcgggggacgcggtgtgcgcgtgtcttgagatgtgannnnnnnnnnnnnnnnnnnnnngctgctgctcctgctggtgtagtactggtgtatccagtccttttaatttcttgat

SEQ ID NO: 4701 - DNA, 268 bp, Zea mays
  misc_feature: Incyte ID No: 700455632H1
  unsure 39, 65, 71: a, t, c, g, or other
ctcctcctacctcctccccgggagccgactgcgccgagntccttggccggagcgccgcgtcctcnaatggnatctcgctctaccgcgggtggagcttcgactccgaatctgctataacccccaagatctgtatcacgggaagcacatctgctagcctacaccagattcttccatggttgtattatcacaaggtcattggcgtttcccatttctttcttttgttgaaggagaggctgcaaagcagctgtcacctctgttcttgaatcta

SEQ ID NO: 4702 - DNA, 108 bp, Zea mays
  misc_feature: Incyte ID No: 700455634H1
  unsure 7, 15, 22, 32, 47, 64-65, 67, 86, 90, 92, 98: a, t, c, g, or other
gcaggcncccgactnccgagtnccgaagcgtncaccggcggccactnccatgtaccctctcttnngntcgccgcgactccatcggnccantnagactnttgtatcgag

SEQ ID NO: 4703 - DNA, 273 bp, Zea mays
  misc_feature: Incyte ID No: 700455636H1
  unsure 235: a, t, c, g, or other
cgcaactaccctctactctctactgcacgcttctactatctaagaaacaacgcacacgggccgaaactaaatttctccaagcgcgcaatcctgtcgccaaccccggccacggatcggggatgtcgtctgctgcgggccgcgcgccggcgccgacgccgatgggctccgccgatcgctgtaagatcgaacgggatcgtggcggcggagaaagccaccaggagctgcgtcgaatgcngcgccaccaccacgcccatgtggcgcagggcccgaccg

SEQ ID NO: 4704 - DNA, 273 bp, Zea mays
  misc_feature: Incyte ID No: 700455637H1
  unsure 52, 258: a, t, c, g, or other
ctcattcgcttacagcatcagcacaggatgatataactggagcacaaccacnacaatctcgttggaagaaacctcgcaaaataatctgcagaacaaattgctttgtatgcaaagaggcttcaacatctggacaaaatccagaagatgttgcagacaactccagaacaatatgcgagaaccagaagtgggtctggtccgaagacatttcctcagcgtcggtgcagctgtcatttcatgtcgtaacgaaagagcccctgntggcctggtagctga

SEQ ID NO: 4705 - DNA, 272 bp, Zea mays
  misc_feature: Incyte ID No: 700455638H1
  unsure 64, 151, 231, 255, 258, 271: a, t, c, g, or other
ccgccgcgcgctcatcaccagggacgcctcttcccagtgacaggctgatctatctcggcgtcgnactcgtactactggcacgtaagtaggagtacgttgacaggatgacatcctgctgctgctgtttgcttgtactattttcgattgtgtntgtaggtttgattgtgccagtctcgatcagagacgatatacacatgctagaataaaatatagcagcgcgtgtgcgcaccnaaagcactaggagtgtgatctcanatngtgcttgtaaagnc

SEQ ID NO: 4706 - DNA, 269 bp, Zea mays
  misc_feature: Incyte ID No: 700455639H1
attgcttagcatgctagcagaatacaatattcgcccacctcaaataaatgcttccatcattacaactgttacaaagcgtttgtaccaacagatgcatttgaagctcagatctttaaatgacaatttaggtgatatgactcaacctggaaatatatataatcccaatcttcagcaagtaaccctatcaagaaatgaaccttccccatcttataatttggattcaaataggaacactctcaacagtatgctcaaggtccaagtgaccgaca

SEQ ID NO: 4707 - DNA, 277 bp, Zea mays
  misc_feature: Incyte ID No: 700455640H1
  unsure 139, 154, 177, 202, 209, 221, 229, 236, 240, 242, 261: a, t, c, g, or other
cccagacccagcagctattgtggtcgtccctcagccgcgtcgcaccgcatgcgcattctacgattacgaagctctctactggctcgcagccatggcgaagaattacccaaccgtgagcgccgagtacagcgaggccgtngagaaggccaggcgnaagtccgcgccctcatcgccganaagagttgcgcgccccttcatgctnccggctngcgtggcactcngcggggcngttcgancgtntngttcgaggaccggcggtcncttcggtactatgaat

SEQ ID NO: 4708 - DNA, 264 bp, Zea mays
  misc_feature: Incyte ID No: 700455642H1
ggttatttgagtacttacaggccaatggcttgaacttccctgtaattcatcacataaatttccctgaaaccattgacagagatggtcttgtcattggtgctggggccaacgttggtgctctcttagtcgatggtcttggtgatggtgtattccttgaagctgctgaccaggaatttgagttcctgagggacacatctttcaacttgctccaaggttgcaggatgcgcaacacaaaaactgaatatgtgtctgtccttccgcggc

SEQ ID NO: 4709 - DNA, 271 bp, Zea mays
  misc_feature: Incyte ID No: 700455648H1
  unsure 104-105, 241: a, t, c, g, or other
cggaccgccgtgttgtggctgccaccgcaaccaccctggacctgctcccggctaagggcgccaagcgcgggttttctgacgaggcgccgacgccatcgcccggnncagcttccgggaagggaaagaaggtagcggaagaggaggacgacaagaaggttgcagcgacgccgcagccggttcgcaaaagcttcaggtggtgggatggccaccaatccgaagctaccgcaagaacacgatgtcnaccacccagctgaagggcagcaaggaggat

SEQ ID NO: 4710 - DNA, 272 bp, Zea mays
  misc_feature: Incyte ID No: 700455649H1
  unsure 105-109, 233, 259, 264, 268: a, t, c, g, or other
gcactaggcccttattctcaggccatcaaagcaaataatcttgtgtttgtttctggagttcttggcttgaatcccgagaccaggaagtttatctctgcaaatgtnnnnncgcaaactgagcaggttatgaaaaacatgggcgagatattgaaagctagtggtgctagctattcttcagttgtgaagacaacgatcatgttggctgatctgcaggatttcaataaagtaaacgngatctatggcaaatatttcccggcgncacanctgncacg

SEQ ID NO: 4711 - DNA, 268 bp, Zea mays
  misc_feature: Incyte ID No: 700455650H1
  unsure 44, 70, 99, 160, 199, 229, 242, 263: a, t, c, g, or other
cccacgctggctcgccaccgccgccgcagcaggcgtgggaatcngggcagcgccccgcggagaagaggangcagcgcgctctccgtccgccatggcggnctcttccgaccccgacaagctcatgagcaaagccgacaaactaacaaaattgagttttacnagatggaatgctgattggaaaagcgtacctccttgtatnagcaagctgcaattgcgtataggttcaganaggataatgaganagcaaaagatgttttgagaangcctc

SEQ ID NO: 4712 - DNA, 268 bp, Zea mays
  misc_feature: Incyte ID No: 700455651H1
  unsure 66-67: a, t, c, g, or other
cggagaccgagcgaggcaggcaacccaccaccgagaggcagggacaggaacaggaagccggagggnnagatgtacgtcggtgttcagcggcgatgagacggcccccttcttcggcttcctcggcgccgccgccgccctcgtcttctcatgcatgggcgccgcgtacgggaccgcgaagagcgcgtcggcgtggcgtcgatgggtgtgatgcggccggagctcgtcatgaatccatcgtgcccgtggtcatggctggtgtgctcggtat

SEQ ID NO: 4713 - DNA, 269 bp, Zea mays
  misc_feature: Incyte ID No: 700455654H1
  unsure 9, 25, 97, 133, 151, 157, 166, 181, 202, 209, 212, 268: a, t, c, g, or other
cgcggacanaccacaggcgcgcaanccaaccgatcgagcagctctagcatggcgagcggcggctactactacgaccagagcgcgggctacggcggcncacagctactcggcggcgccaggaacgacgccgtcncacctcctggtgttcctngccacngtggcgctnctgggcgccacgtcnctctactctgcgctacgagtncgcggtnganagcctggtggaccagtgcggttcgccgttgtactatccccgctgctggtcctcgtnt

SEQ ID NO: 4714 - DNA, 271 bp, Zea mays
  misc_feature: Incyte ID No: 700455655H1
  unsure 144, 236: a, t, c, g, or other
tcccgtcgcatcccatcccactaccacccatctcgtcgtccgccgattcgatccggttcttccaacccaggggctgtgatggcgacgaagaggagcgtgggcaccctcggcgaggcggatctgaaggggaagaaggtgttcgtncgcgccgacctacaacgtccctcttcgacgacgcccagaagatcaccgacgacacccgacatccgcgcctccgtccccaccatcaattcctncttcgagaagggcgccaaggtcatcctcgccagcc

SEQ ID NO: 4715 - DNA, 267 bp, Zea mays
  misc_feature: Incyte ID No: 700455656H1
aaagaagatcatcttgctctctctcaaatatatccccaagaaagcctgtgaccgccggatcaatgaatttgttaaacgtgctagagctgccaagatccatgcttatataataggtcatctaaagaaggagatgcctacaatgatgggcaaagcaaaagcccaacaacgactcatagacaatctgcctgatgagtttgcaaaggtgcaacgggaataccatcttccgtcgggagattttcctacgtggagcacttcaaagaggtgttg

SEQ ID NO: 4716 - DNA, 265 bp, Zea mays
  misc_feature: Incyte ID No: 700455657H1
  unsure 11, 51, 81, 103, 107, 119, 134, 141, 144, 147, 152, 168-169, 171, 173,175, 181, 186, 188, 201, 211, 230, 241, 243: a, t, c, g, or other
taccgcgaganctctcagaaggccctagcacgcaaaaaccccacgagaganacgaatcttccgaatctctcggtggcgatngcgctctccgaccgctcccgcnagtngctcctcccgancttcctctacggctnctacggngangcnctttngctgccacaggagccnngngngntccctntgctntncccggagactgangcggctggancaggaggcggcgtgtgttntcgatccaggngnccaaggagaagatcgagatgta

SEQ ID NO: 4717 - DNA, 265 bp, Zea mays
  misc_feature: Incyte ID No: 700455658H1
  unsure 183: a, t, c, g, or other
gcgttcccattggattacttcttaggctggaaagagtgaaagattcttaggctggaaagagtgaaagacctggatgcactaaatcctgttctggaacagttacggtcctggaattgatcccatgctgccgaacgggccctaagttggaacctgttcaggcggggggtcagctcgcagctgacnggggatccggcatcgcatcgccagaacgccaggaggggactatcagccatggcagcgaggcagccgccgacttcgtccgcgt

SEQ ID NO: 4718 - DNA, 252 bp, Zea mays
  misc_feature: Incyte ID No: 700455659H1
  unsure 52, 249: a, t, c, g, or other
cccgccgtcgcaaaactcgccagcggccagccatggggtacacgaaggaccngcttctcgcgcacctccagaagcttaagattgatttcacgtgctacgatcacccggttgtgttgacagtggaggaaaggccaaacatgttggccatttaggaggtgctttgagcaaaaatttactcttgaaggacaagaagcatcggttatatgttatttctgccctgctggcaccaaagttgacatgaaattcttnccc

SEQ ID NO: 4719 - DNA, 129 bp, Zea mays
  misc_feature: Incyte ID No: 700455660H1
gcaatgtgaatttgtaatgtgggtctgcagcaaccaaagagtgaagttgctcgggtttgtatatatgacatgtaataagttgactgctacgtgtacgatgttcaatgttaaaacacaactcttctgatc

SEQ ID NO: 4720 - DNA, 233 bp, Zea mays
  misc_feature: Incyte ID No: 700455662H1
ggcgacgagcctgggcgacctgcgccgccgcccctagcccaggtctccatcggacgcttcgccaggtcttgtttagacccatcgccggcaccgagcaacttttgttatcggatcccgcatcgtggaatgcttgccaaagggaggaaggtagctggaaggcgtgaagaaatgtctgcaaattatgcgtttggaccacaggatgatgatgcgatataaacacaggcttctgacta

SEQ ID NO: 4721 - DNA, 267 bp, Zea mays
  misc_feature: Incyte ID No: 700455663H1
ctcgcctagccgccggagaagcgccgctcgctcaggaggacagccatggcgccggagccggaggatgatattatgaacgagaagaatccccgcccgctcgacgaggatgacatcgcgctcctcaaaacctatggactggggccgtattcgaccagcattaagaaggtcgagaaggagatcaaggaaatggccaagaaaatcaacgacctctgtgggataaaggagtctgatacagggctggctccacctagccagtgggatttggtt

SEQ ID NO: 4722 - DNA, 266 bp, Zea mays
  misc_feature: Incyte ID No: 700455664H1
gcacgggcgggatgatcgtctcgctcatctgcctcgggtcggggctcaccgtccgcggggcatcacccggacaccaaggtcgcgtgggccgtcgccctgtgcatcgcgtccaccctgtcctacatcgccttcttctccatcggcctcgggcccatcacgggcgtgtacacctcggaaatattcccgctgcaggtgcgcgcgctgggcttcgcggtgggtgtggcgagcaaccgcgtcaccagcgccgtcatctccatgaccttcct

SEQ ID NO: 4723 - DNA, 270 bp, Zea mays
  misc_feature: Incyte ID No: 700455666H1
  unsure 99, 104-107, 229, 246, 266: a, t, c, g, or other
ttcaggcccgtgtacatctacggcccgctcaactacaaccccgtcgaggagtggtttttccaccgcctcaaggccggccgccccatccccatccccggngccgnnnncccagatcacgcagctcggccatgtcaaggatctggcaagagccttcaacctggtgctcgggaacccccaggcgagcaagcagatcttcaacatctccggggccaaatatgtcaccttcganggccttgcgcgggcatncgcaaaggctggaaggttcnctga

SEQ ID NO: 4724 - DNA, 263 bp, Zea mays
  misc_feature: Incyte ID No: 700455667H1
  unsure 45, 229, 247, 260, 262: a, t, c, g, or other
ctttggtcattgtgtgcaacaagactgacttgcagccacttgaanggctttctgaggatgacatgaagctagtcatggagatgaaggcagaggctttgaagactataatccaagctggtggtcctaatgatgagggtgttttgttgactatgagcactttaactgatgctggtgtaatggctgtcaaaaatgctgcatgcgagaggcttctgaacagagggtggatgtnaagatgaagtcaaaaaantgatggattgctnant

SEQ ID NO: 4725 - DNA, 267 bp, Zea mays
  misc_feature: Incyte ID No: 700455669H1
  unsure 30, 75, 120, 126, 172, 212, 258: a, t, c, g, or other
caccaacaaagttaagtggggaggccaganctgcccagctgggtcgctgttctaccagagggatggacgggagcnccggctccttcgtcgccgtccgccggctctccggctccgaccgcnccgccnccttccaccactcctcttcggcggaggtcgtgacggggtcgacggngtggatcgggagggggctctcctgcgtctgcgcgcagagnagggacagcgatacgcgcctttccttcgatttgacgcctgtgccangaagaatgc

SEQ ID NO: 4726 - DNA, 264 bp, Zea mays
  misc_feature: Incyte ID No: 700455672H1
  unsure 5, 7-9, 26, 87, 95, 117, 139, 218, 248, 255, 261: a, t, c, g, or other
ggaanannnagttactattgattttncagccattcaagcctatcaatgtgtcactcctacctttgtgacaacaagttccacactgangctttaantgagctcttggaatctgatganaagtttgggttcattgttatgnatggtaatggtactctttttggcacactaagtggcaatacccgtgaagtgctcacaaattcactgttgacctcccaaanaagcatggtagaggagggcagtctgctctncgttttnctcggntcg

SEQ ID NO: 4727 - DNA, 264 bp, Zea mays
  misc_feature: Incyte ID No: 700455673H1
  unsure 167: a, t, c, g, or other
agccgcgtcgcgtcgcatcctacgatccaaagctctctctgctcgcagccatggcgaagaactacccgaccgtgagcgccgagtacagcgaggctgtggagaaggccaggcgcaagtccgagccctcatcgccgagaagagctgcgccccgctacatgctccgcctncgcgtggcactccgcggggacgttcgacgtgtcgtcgaggacgcgcggtccattcggcacgatgaagcatcagttcggattggctcacggcgtaacg

SEQ ID NO: 4728 - DNA, 262 bp, Zea mays
  misc_feature: Incyte ID No: 700455674H1
  unsure 183: a, t, c, g, or other
gaagaagggaaaaaggcactttctgctgcagctaagaaatttaaggttccttcctctgaaaatcttggggagattgctgaacactgtaatgaaagaaagtgggctggtcgccgtgcagaagaagctggacagaagctctacatgtgggctctgataaagaacaaagagactgtggtatgcaangctagagttctgggacttggtcccaggttcatgtcagtttatgtgcccaagcttgcgatggaacgaaggatatattatg

SEQ ID NO: 4729 - DNA, 262 bp, Zea mays
  misc_feature: Incyte ID No: 700455675H1
  unsure 218: a, t, c, g, or other
cattattgccgtctcccttttgcgtgagaaagaaagagagcgagaagcagtcgccatgtctggcatcatccacaagatcgaggagaagctccacatggggggcgaccacaagaataaggaggaggagcaccacaagaaggccgaggagcaccacaagaaggaggagggggagcaccacaagaaggacggcggggagcacaaggaaggcatcgtggagnagatcaaggacaagatcaccggcgagcacggcgacaagtccggc

SEQ ID NO: 4730 - DNA, 266 bp, Zea mays
  misc_feature: Incyte ID No: 700455676H1
  unsure 12, 61: a, t, c, g, or other
cggaagtttcanatcctcgcatcgtccgcaccttatcctctcgactttacagtacctgctnctacagctacctaccctatctcaatggcatccgcgaatgccatctccaccgcctccctcctccggcccctctctcagggcagggcgacgaggtcacagcggttcgtggtgcgtgcgaacgccaaagacattgcctttgaccagaaatccagggcagcgctgcaggccggcgtcgagaagctggcaaacgccgtcggtgtcaccct

SEQ ID NO: 4731 - DNA, 260 bp, Zea mays
  misc_feature: Incyte ID No: 700455677H1
ggctgatccagattgggggttccttggttcctcgtcgagtttctgcttctgagaagaggcaacggaaactgaagagtggacaaaagttgcgccggtttcaggagagctcttacatggatccaaatcaaagtctttgcctggagcactatttaacatagcagcaacaaatggcctagacatgggcagaagattatgcatctttggcttttgccgttctattgaaatgttaagcgatgtagtggaagatacggtattggagc

SEQ ID NO: 4732 - DNA, 267 bp, Zea mays
  misc_feature: Incyte ID No: 700455679H1
  unsure 12, 45, 93, 217: a, t, c, g, or other
cttctcttcacncacacgctggtcatagagatgtcggctgcagangcgaaggcggcggcggtcccggagtctgtgctgcggaagcgcaagcgngaggagcaatgggcagcggacaagaaggagaaggcgctcgcggacaggaagaaggcgctacgagagccgcaagatcatcttcgcccgcgccaagcagtacgccgaggagtaccacgcccaggancaagggagcttgtgcagctcaagctgaggcccggttgaagggtgggttcc

SEQ ID NO: 4733 - DNA, 104 bp, Zea mays
  misc_feature: Incyte ID No: 700455680H1
  unsure 5, 8-9, 34, 45-46, 48, 51, 56-57, 91, 94: a, t, c, g, or other
ctctngannaaagccaagtgttccctgtggctgngaggaagagtnntnctngcaanncactttggaaagtgattacttggaaacttacaangcnttgccttttt

SEQ ID NO: 4734 - DNA, 264 bp, Zea mays
  misc_feature: Incyte ID No: 700455681H1
  unsure 100-103: a, t, c, g, or other
gacgagattattcgattggagtttagtcattatgatgtcaagtcgtctaaaactataccagcaaaggattttgcattgtccatggttgcttctgctgacnnnnaccatatcaacaagctgcttgatagagctgatggtttggtcaaggagccagatctgaaggacatacgcatcacctttgaggtatgacttggcgttcttgatatcaaaattatttttgcactcagtttatctcttattattttcagaagtgtatttgcaacc

SEQ ID NO: 4735 - DNA, 260 bp, Zea mays
  misc_feature: Incyte ID No: 700455683H1
agaggttgaacaacttcagagtggcaggtttgcagatgtcgaagaattggtatatctgaaatggataaatgcctgcctacggtatgagctgagaaacaaggatgccccatcagggaagactgttgcacgagatctagcaagaccctgagccccaagtctgaattgaaggccaaacagctgataatggaatatgccaatgtgggtgcggaggacatcacttggggcatgtcgaattcggttcagagtgtcttcctccaggg

SEQ ID NO: 4736 - DNA, 265 bp, Zea mays
  misc_feature: Incyte ID No: 700455685H1
  unsure 131, 153, 157, 160, 163, 169, 178, 215, 217, 235, 237, 239, 242, 256: a, t, c, g, or other
cgcgcggcaactgggccatcgccgccacccctacccaggtcttcgtcggtcgcttcgccagccgccaggtcttccgtcggcccatcccccggtcttcgtccttcaatcctccggcgacgagcacccaccanaggctgggaactccaaagaggnacanggnccntggctngaggcgcangaaatggttcgaacgaggcggtgcaggcaaaggggantnggggtgataacttccggngncnaanccgctgccccttgntgcgtcaag

SEQ ID NO: 4737 - DNA, 235 bp, Zea mays
  misc_feature: Incyte ID No: 700455687H1
  unsure 109, 142, 215: a, t, c, g, or other
gggatggggggagcgcaattccccggcgacaacgacgtcgcggaagtagacgcggcccgcgacggagaggtggaccgccgtgacgtgggcaagatgaagcacgggtganagcattaccggcggaggtgcaagattcgtggcnccgtgctgcaaccaggtgttcccctgccgccactgccacaacgaggctacggcttcccggagatcggcatacnatatgtcgtcaagttgttga

SEQ ID NO: 4738 - DNA, 261 bp, Zea mays
  misc_feature: Incyte ID No: 700455688H1
gtgctagagtacctcatgcgtattaggaaatgaggcattggtagtggcaactcgaggagaatacttagacacatctactggcgtagtaatgacgttcagtgagataacttagtatgttttgggcactgctaaccgtaaaggttcatgtattaatatagtgggtaaatggttctagagtactgaactgagcataccattgtatagtactgaaataacaaataccacgcatggtattatttggctcccagtcaatagatccag

SEQ ID NO: 4739 - DNA, 259 bp, Zea mays
  misc_feature: Incyte ID No: 700455689H1
gaagagtcttcagacaggaacaatagcagcccaggcgatataccagcgaagaatgtttctcgtacattacttgagatgtgtgcaggaaatggtttcagagagtaccaaccaaaaggcttgaaccctcctaatggtaaccaatttggatttatggtggccccttcacaggagcagatgttataccaacagaaggtccatgcaccgccgtactcgtcaccattcatggggttccacaatcaccccttggcattccaacaaa

SEQ ID NO: 4740 - DNA, 254 bp, Zea mays
  misc_feature: Incyte ID No: 700455690H1
agtacgagaacgaggacctcatcaaatacggcttccccgaggacatctggttccatgtagataagatgtcctctgcacatgtgtatgtgagattgaataaaggtcaatcaatggatgacatgagtgagggttgctggaagactgtgcgcagttgtcaaagctaattccattcaaggtaataaagtcaataacattgatgtagtttatactccatggtgacaattgaagaagacccctcaatggatgtaggccaa

SEQ ID NO: 4741 - DNA, 223 bp, Zea mays
  misc_feature: Incyte ID No: 700455692H1
  unsure 53, 135, 202: a, t, c, g, or other
tagcagtgacattcccagagagccccagagctctacaagctcctttctgtcanggtggggggttcagcctgtcctgtcacctctgaggtgcctgctggcatcctctcccccatggcttactaatacattcccttnccccatagccatcaaaactggaccaactggcctcttcctttcccctgggaccaaaatttaggggccncagtccctcaccgccagccct

SEQ ID NO: 4742 - DNA, 229 bp, Zea mays
  misc_feature: Incyte ID No: 700455694H1
tcgtccctacgccccatacgcgatggcccggatcaaggtgcacgagctgcgggggaagagcaaggcggatctgcaagcgcagttaaggagtttaagtcggagctctccctgctacgcgtagccaaggtcaccggcggggctcccaacaagctctccaagatcaaggttgtgcgcacctccatcgcgcgcgtgctgaccgtcatctcgcagaagcagaagtcggcgctgc

SEQ ID NO: 4743 - DNA, 260 bp, Zea mays
  misc_feature: Incyte ID No: 700455695H1
  unsure 24, 71, 122, 130, 166, 195, 217: a, t, c, g, or other
gtgatcttttatggtgaaactccnaagaaacaggtggttttgctggaaacttggtagacccttaattatantggtgctaatgagtactactgtaatataaagccaccattattttttatcanacatctgnatacattttacaaaggctattgtgagggcattattntgagcatctattttgaggtgatgtttaanaaaactttaacatcaaatcaanttgtaaattaatttaaatatattgccttaaggacctactagag

SEQ ID NO: 4744 - DNA, 256 bp, Zea mays
  misc_feature: Incyte ID No: 700455696H1
  unsure 11, 13, 26, 40-41, 54, 56, 58-59, 65, 72, 88, 92, 99, 113, 118, 134,138, 142, 152, 176, 188, 200, 202, 205-208, 217, 219: a, t, c, g, or other
cgcaggggctncngctgagggggcangcggagttgaggannccgcagataagtntntnnctcttngaaaganagagattaatacaacnactnaaaaaanatagtcaataggtnactangatattgcttagcgtnaagntttnaacgtaattntaatagcttaagattttaagaganaatatggagacnagaagagtagcngnggnnnnggcccacananggtttctaaaacatgacggaggttgagctgaagctct

SEQ ID NO: 4745 - DNA, 190 bp, Zea mays
  misc_feature: Incyte ID No: 700455701H1
  unsure 8, 17, 74, 98, 107, 120: a, t, c, g, or other
ggtaagcngcagcaggnaccctagacaccgccgacatccgcgaccatgggtatcgacctacgttgccggtgggnggtacaagaagaccagcgcacagnacgaaagtnccgacgatgtttntctcaagctccttgtcaagctctaccgtttcttggtcaggaggaccaagagcaacttcaatgctgtcttc

SEQ ID NO: 4746 - DNA, 197 bp, Zea mays
  misc_feature: Incyte ID No: 700455706H1
  unsure 43, 57, 116: a, t, c, g, or other
cgaaccgcgattgctcctacagaaggcactagcaacgcaaaancccccacgagagancacgaatcttccgaatactactacggtggcgatgggctctccgaccgctcccgcgagtngctacctcccgagcttacctactacgcctcctcggagcgctctttcgctgccacaggagccgccgcgcgcctccctgtcta

SEQ ID NO: 4747 - DNA, 183 bp, Zea mays
  misc_feature: Incyte ID No: 700455707H1
  unsure 5, 38, 64, 70, 74, 78, 122-123, 129-131, 141, 152, 178: a, t, c, g, or other
ggganggtgatcatcattgagatactcctgggcccgtncatggggccggtacatgtacgaggcncagctncagngcgntctgctctgatggtcaacaccaagggcaggcagcgcggcgaagnnattgannncacatctttnccaaggctggnttcttgacaaccttgtagtcggagangccag

SEQ ID NO: 4748 - DNA, 200 bp, Zea mays
  misc_feature: Incyte ID No: 700455708H1
  unsure 15, 44, 63, 84-85, 90, 94, 117-118, 123, 128, 147, 156, 161, 169, 192: a, t, c, g, or other
ctaacaacatctgtncaccgtgaaatctcggctacctacctgancttctggttacctacgccnccggggtacccaactaccganncccanccancataccaaagccaccgcggatgnnctatnccgcntacatcaatggtgctgatncactctcgnaccgngactatcntacgaccgacatgctccacgacntcccgggc

SEQ ID NO: 4749 - DNA, 197 bp, Zea mays
  misc_feature: Incyte ID No: 700455709H1
  unsure 10, 18, 21, 88, 166, 189-190, 192: a, t, c, g, or other
gcgccgcgcnggtgcagncanaccaattctaccaaacctacacgggcgttcagggcgccgtacaattgcagggcgaggaccagaagangctcgatgtcgtctccaacgaggtgttctccaactgcctcaagtcgagcgggcgcaccggcgtgatcgctacggaggnggaggacgtgcccgtagcggtgnncncgagc

SEQ ID NO: 4750 - DNA, 170 bp, Zea mays
  misc_feature: Incyte ID No: 700455712H1
  unsure 2, 60, 63-64, 121-122, 126, 129: a, t, c, g, or other
cngttggcaagcagagcacaacacttgtactgttaagtgtcttttgggttgttggatttncannacaaaagtgcgcgcatactacctacagtgtttctgcaggctgcagtaataaactggnngggnctnttctattgataatgacagcaataataagttcgttattgtgc

SEQ ID NO: 4751 - DNA, 192 bp, Zea mays
  misc_feature: Incyte ID No: 700455713H1
  unsure 13, 17, 63, 65, 99, 110: a, t, c, g, or other
gttgccatgagtnatantatatcaccatggacttgtctctaaccagtaccttgtggtcccgtngntatacagtcttttttaccatctagagaacagccntacccattggnggcagcacctggagcccagcggattattgcgcctacagctgatggtggccaatttggaggtgatccctgacaggcctccagt

SEQ ID NO: 4752 - DNA, 200 bp, Zea mays
  misc_feature: Incyte ID No: 700455714H1
  unsure 26, 29, 37, 43, 52, 54, 66, 68, 72-73, 90, 100, 106, 147, 169, 176: a, t, c, g, or other
ctaaaaaaaacaaaaagggtacgaangcngacgaaanctacanacccccgcngntctcgccatcgncnccgnngcgcacgtcagatccangtgcgccgcncccccntacgacctaagctgacgacgaccataccatacgactcaggnaggatgacgggctccatggatntacccgnccaagggcgggttacagcttcgac

SEQ ID NO: 4753 - DNA, 185 bp, Zea mays
  misc_feature: Incyte ID No: 700455716H1
  unsure 3, 5, 43, 56, 110, 161: a, t, c, g, or other
ttnangttgatgctcttgctaaggcattggctggtcaaaaggntgaggcttattcncagcaaatgctgagctcaggcctcgaggaatcctcaccccgtgtgaaccaatgnagaagtccagaaggctgctgctgctctcaagggctctgaccaccgccgtgnaaccaacgttatgctagattggat

SEQ ID NO: 4754 - DNA, 190 bp, Zea mays
  misc_feature: Incyte ID No: 700455719H1
  unsure 3, 9: a, t, c, g, or other
aanctacgngcaatcttcgggcctatagacagcgctaacatggcactacatggatctccaggaagggaacgagaggcttttctaacaagttgccattgacaacgtcgaggagttacttccaatcgtgtacactaccaaccgttggcgaggctgccaaaagtatggatcctatttagtcgccctcagggtc

SEQ ID NO: 4755 - DNA, 245 bp, Zea mays
  misc_feature: Incyte ID No: 700455720H1
  unsure 21, 27, 42, 59, 61, 63, 73, 92-93, 119, 124, 128, 133, 149, 153, 165,171, 173, 186, 191, 195-198, 204, 215, 244: a, t, c, g, or other
cttcgtaactggaacccaatnctggcncaccaacaacttttngatccacaaccacaggnananttcaaaaatncagaaaaaaattggcaggnntgaccggctaacttggccgaccgggnttctncggnccgtngcttgacccgaccaangggnaacccggacggncgaaangnagccaggggttgnttganccgnnnnccccgncccacaaaggnaggaaacggaccgtgttaagttgaccgtnc

SEQ ID NO: 4756 - DNA, 189 bp, Zea mays
  misc_feature: Incyte ID No: 700455722H1
  unsure 6, 18, 29, 33, 56, 98, 103, 184, 188: a, t, c, g, or other
ctcgcncaatgtacggcncgcacaaagancctnccgaggtcgcgtacgagcagaancccaacgatgccgaacaactgacgcggtggggcggcgcgctnctggngctgtacgcaggtccgaaccggccccgacagcctcaagcttcttgaagatgcggaagccaaactggaggaggcacttcaanttgnt

SEQ ID NO: 4757 - DNA, 197 bp, Zea mays
  misc_feature: Incyte ID No: 700455724H1
  unsure 7, 20, 45, 47, 53, 68, 73, 82, 86, 93, 103, 119, 128, 140, 168: a, t, c, g, or other
ctcgcgnacagaccgactanactacctgagttgggcataccgggncntctgcntacaatgctgtacgntcgangctacgacnccancttacgngtcgtacccnggagttcacccaggcngcgctaccnatacgaccgganctcaccggatgccgctccctggacgggntcccctgaagccaatcgtccgcaccccct

SEQ ID NO: 4758 - DNA, 190 bp, Zea mays
  misc_feature: Incyte ID No: 700455725H1
  unsure 8, 61-62, 66, 94, 99, 140: a, t, c, g, or other
cttcagancttctattgatccagcgtatatccagtaccttgctcaaattgcagctcaactnnagangatctctaatggacaggagccaactggncagtncttacatggacttacttggtacacagaaagctaaccttggncctttacttcagtcacaaaagcaatatggttactgtggacaatcttggat

SEQ ID NO: 4759 - DNA, 183 bp, Zea mays
  misc_feature: Incyte ID No: 700455727H1
  unsure 24, 37, 43, 53, 69, 71, 112, 118, 149, 159, 172: a, t, c, g, or other
tatggacaagctgggtcatggctntacatgccttggntgtccntctgcttctnctactatagtcatctntnccgataacccagtgactctggcaaggtccacagcactgttngacaangatggctgtcaggtgatgcttttataacatncacgtatganggaagtagcgcanagacgctacga

SEQ ID NO: 4760 - DNA, 191 bp, Zea mays
  misc_feature: Incyte ID No: 700455728H1
  unsure 17, 57, 78-105: a, t, c, g, or other
gggcacggcgtcctggnggtcaggaacgaacaacgacacgcgctctggcggtggcancgaaacccaggaacctccatnnnnnnnnnnnnnnnnnnnnnnnnnnnnagaggtctacatcgtcagggagcccgacaagtgcctcgccaagacggccagattgttggcctattgattgatcctcactcctagct

SEQ ID NO: 4761 - DNA, 189 bp, Zea mays
  misc_feature: Incyte ID No: 700455729H1
  unsure 2, 15, 25, 89, 188: a, t, c, g, or other
gnaaatgctattttnaccattaccnaccagagctggcttatggagcatcctggttacacctaccaactatccccacccaatgcaacccngcatttgatgttgagctgctttcatggaccagtgtcaaagactttgcaaagatggcggcatattcaagaagatccttaaagagggagagaatgggaganc

SEQ ID NO: 4762 - DNA, 190 bp, Zea mays
  misc_feature: Incyte ID No: 700455730H1
  unsure 2, 12-15, 21, 37, 61, 63, 67, 83, 90, 93, 132, 138, 158, 161, 188-189: a, t, c, g, or other
gnaaatgctatnnnnaccatncctccagagctggacntatggcgcatctggatccactacnantaancccacccaatgacaancctgcgnttnatgttgagctgatttcatggatccagtgtcacagcacanttggcnagatggcggcatattcacgnagntccttaaagagggagagacctgggagnnc

SEQ ID NO: 4763 - DNA, 187 bp, Zea mays
  misc_feature: Incyte ID No: 700455733H1
  unsure 29, 33, 49, 148, 169, 185: a, t, c, g, or other
gtacatctccaaccatttactaatatccngggntggttacctggatttnaaggagcgggtgctagcgaacagcttaccgcactattgtatagttgcaaactatgaacaccttcgggcacaaacctgcactttctgtgggaagcgacanactggaagtggagttgtggcncttctagagattgcgnga

SEQ ID NO: 4764 - DNA, 158 bp, Zea mays
  misc_feature: Incyte ID No: 700455735H1
  unsure 40, 67: a, t, c, g, or other
atgtttggcctgcagtctgtgctgctatggactatatggntacagtttgaccgtgatggtgtggtcncattgagaatgatggatttcctgatcaaacctatgatgcttggactgttcatggaatcagtgcttactgtggttgtcattggctgctgcac

SEQ ID NO: 4765 - DNA, 188 bp, Zea mays
  misc_feature: Incyte ID No: 700455736H1
  unsure 9, 50-51, 80, 85, 120: a, t, c, g, or other
ctacgagcnaaaaaactcgtcgcttccgctaccacaggatcctctgagannaaaaacaaccgtgcgaccgtaccgtgctnccggngaacccgatccgaccgaacccgtacccgtacccancacaccctaccgccgctcgcagctatgtcgccgtcggagccgacacgggaggagagcgtgtactggcc

SEQ ID NO: 4766 - DNA, 182 bp, Zea mays
  misc_feature: Incyte ID No: 700455739H1
  unsure 53, 69, 71, 93, 106, 126, 141, 146: a, t, c, g, or other
gaagagtcaggccgaatgttctgcaatacaagaacgatgatcttgatgatgantccggtgggatgcgangntcaggcggcgaggtacgaaacncaccgcaaccggnaggtgaccaatttgtccgancaggaggagaagggncaggntcaatgagaaaatgcgcgccctgcaagagctcatcc

SEQ ID NO: 4767 - DNA, 186 bp, Zea mays
  misc_feature: Incyte ID No: 700455740H1
  unsure 2, 25, 40: a, t, c, g, or other
gnactgtaccggttggtcgtgtggngactggtgtcatcangcctggtatggtagtacacctttggtaccaactggcctgactactgaggtgaagtctgttgagatgcaccacgaggcgcttacaggaggctcttccgggcgacaatgttggcttacaacgtgaagaacgttgctgtacaaggatct

SEQ ID NO: 4768 - DNA, 189 bp, Zea mays
  misc_feature: Incyte ID No: 700455742H1
  unsure 2, 70: a, t, c, g, or other
cnatataatgtcacaggcaggtacgattaagggttctgttttaccacccaaggcacacagcagctaagtncccaaagtctctacccaggtaagtattgaagctcttggtaagtatgcacataccccaaggacctgaactttggggccctgctactgaaagcccagacctacggggtctgcccttggagc

SEQ ID NO: 4769 - DNA, 181 bp, Zea mays
  misc_feature: Incyte ID No: 700455748H1
  unsure 2, 11, 53, 151, 153, 157: a, t, c, g, or other
tntaaaggtantgtaaatgtcttatgattaagaacagtgtgatgttcctttgntggcatgctatgctaataacctggcatgcaatgttgaagcatgttgaaatgcttctattcattgttctaagttggggtccatattgatggtagtcccncnttcntcgtatgttcataagatgggtcgg

SEQ ID NO: 4770 - DNA, 181 bp, Zea mays
  misc_feature: Incyte ID No: 700455749H1
  unsure 29-30, 61, 91, 110, 115, 136, 156: a, t, c, g, or other
gtgatcacagcatcagctcctgaggaagnngatatccttgtcaggagctgtagcaatactncaatgtgagctttggataccatgtgattcncatacagagcttttcaccngaaantgatctggccatggcatttcncctaagaacacgtttgggantaataccatgatggggtcagaaatg

SEQ ID NO: 4771 - DNA, 186 bp, Zea mays
  misc_feature: Incyte ID No: 700455752H1
  unsure 36, 46, 72, 77, 84, 91, 142, 182, 184: a, t, c, g, or other
cttaccgcaagcatatgcctagacttcaaccagagnatattgtcangaatgctaagatattcgagcatgtgnatgcnatgccanctaaaanaggatgcacaccatcacagctagcattggcatgggttcaccatcagggaancgatgtttgaccccatacctggaacaacaaaaatacgagnantt

SEQ ID NO: 4772 - DNA, 195 bp, Zea mays
  misc_feature: Incyte ID No: 700455754H1
  unsure 2, 83, 86, 104, 141, 150, 193: a, t, c, g, or other
gntgcggtcgtccctacagccgcgtcgcaccgcatacgcattactaacgattacgaagctctatgctacacgggggacctggnganaaatacccaaaccgtgancgccgagtaacagcgaggccgtacgagaaggccaggngacaagtancgagccctacatacgccgagaagagctgcgcacccctacatgntc

SEQ ID NO: 4773 - DNA, 181 bp, Zea mays
  misc_feature: Incyte ID No: 700455756H1
  unsure 46, 56, 58, 62, 129: a, t, c, g, or other
ctgaaaccagagcagtacattctgaaggttggtgaaggacaggctncccagtgctncncggnttcacagctatggatatcccaccaccccgtgaccctatactggatcttgggtgatgttttcatgggngtctaccacaccgtacttcgactatggcaagctgagggttggcttcgcgagt

SEQ ID NO: 4774 - DNA, 178 bp, Zea mays
  misc_feature: Incyte ID No: 700455759H1
  unsure 40, 53, 59, 122: a, t, c, g, or other
ggcggtgggcgatgctgggcgtggcgggatgctgatcccnaagtgctgacccnggccgngctgatcaacgcgccgcgtgtacgaacgccggcaagtcggagtacttcgcgtcgtcgtcgacnaattcgtgatcgagttcatcctgtttcactacgtggagatccggcggtggcaggac

SEQ ID NO: 4775 - DNA, 191 bp, Zea mays
  misc_feature: Incyte ID No: 700455760H1
  unsure 2, 129, 165: a, t, c, g, or other
cnaaattctgccgtctccaccgccgaccgcgccagcgtacaccggaggaatctgccgtctcccttgctaccacgcgatgaacaccgacatacaccgacctacgactaagccggagtacccggtggtggntcggaacccggaccttcaccaaggtggtacggcaanttctctgcgctcgactacatgcgcct

SEQ ID NO: 4776 - DNA, 183 bp, Zea mays
  misc_feature: Incyte ID No: 700455764H1
  unsure 11, 23, 31-32, 45, 97-98, 101, 111, 121, 179-180: a, t, c, g, or other
tggtttgagangtactccaaatnccaaaaannggctatggaaagnttcctgttgtgggccacccgcaacaagcaaccatatacatggactatgggcnntancctttaaggnagcgtcagancggctttgcccagtaagggcagctggtcatgagtgtggatgtctgcctatgttaaccnngtt

SEQ ID NO: 4777 - DNA, 195 bp, Zea mays
  misc_feature: Incyte ID No: 700455765H1
  unsure 17, 107, 123, 125, 155: a, t, c, g, or other
ggcggccgggtcggatnctgagaacgagacgagttaccatactcatacccaactaccggaacgaaacaagttcacctctcatacccaataccgcctagaaccggatnctcgtacggactcggntnccgcccgaaccaccccgagccgccgcgatncaaagaagatggcagctgtacgaacacttcctcttcacct

SEQ ID NO: 4778 - DNA, 229 bp, Zea mays
  misc_feature: Incyte ID No: 700455769H1
  unsure 3, 50, 58, 62, 68, 75, 82, 90, 92, 99, 132, 141, 148, 155, 171, 179,197, 206-207, 224: a, t, c, g, or other
ccnagacaccaagcggcaactactaaggcaaatgcgcttactagaggttngtaccgcncctnaaacgnacgcccnaaactanctaatggncncaaaacngatgatatggtggataccagcgtactacctaangctacacgncccctgnacactgnggtgacgacccgtggncgattggncattccccaaggacgatncttaaccgnncatggtgtagcctggcntacag

SEQ ID NO: 4779 - DNA, 192 bp, Zea mays
  misc_feature: Incyte ID No: 700455770H1
  unsure 2, 5, 9, 26, 88, 108, 111, 119, 142, 149, 159, 170, 178, 188, 190: a, t, c, g, or other
gnaantgcnatttttaccattacctnccagagcctggcttatggcgctatggtcacacctaccaactatgccacccaatgacaacccngcatttgatgttgagctganttncatggaancagtgtcacagactttgcatcgntggcggnatattcaagnagatccttaangagggagngcactggganancc

SEQ ID NO: 4780 - DNA, 188 bp, Zea mays
  misc_feature: Incyte ID No: 700455772H1
  unsure 2, 67-68, 77: a, t, c, g, or other
cnagttcttcttcctaatccatttgatagaccgcgtgctgttttcctcgtgcaaattgatgggttcnntgttcctancttcgtatcgaaggcagcaacattttcaagaccaggattgaaggtgcaaacatacgctgatacagggcttacagataaggatgacttaattgtaattcattcagatgaatc

SEQ ID NO: 4781 - DNA, 186 bp, Zea mays
  misc_feature: Incyte ID No: 700455775H1
  unsure 32, 35, 61, 113: a, t, c, g, or other
ctttgatagagtcgagacctaacacaggaacnacnctacaatatgtatagaagactatggncgtgttggtgatccaaaagaggactgtgccatgtttgatcaaatgaggaggnagtttggacacgaagcagatgacagttccaattgctggtgtggtggccgcatacatgaagaataaccaactag

SEQ ID NO: 4782 - DNA, 181 bp, Zea mays
  misc_feature: Incyte ID No: 700455776H1
  unsure 57: a, t, c, g, or other
gcacccagcccggaatctgcaacctcgccagcggttgctgaaggttcttccccttgntcgatcggttggttgcttgactgattggcccgcttcctttgttcctggttgagaaggaaagcatacgcgagttcgccatacggatgggttccaaagcgcctttctgtctcacgctcctcttgct

SEQ ID NO: 4783 - DNA, 118 bp, Zea mays
  misc_feature: Incyte ID No: 700455778H1
  unsure 10, 14, 27-29, 42, 58, 65, 72, 81, 91, 107-108, 113: a, t, c, g, or other
ttgcggtcgncccnaagccgcgtcgtnnncgcatacgcattnctaacgattagacaanactactnctcgacngggggaccntggtcgaagnttacccaatccgtganngccgngtaca

SEQ ID NO: 4784 - DNA, 184 bp, Zea mays
  misc_feature: Incyte ID No: 700455780H1
  unsure 2, 66, 70, 112, 127, 130, 150: a, t, c, g, or other
cnacgccatacctaccagaaccatacgccgaggggaagtacaggactgctgatacttggtggaccngcancgacatcagagtttacaacgcgactgtgatcacatctgaganacggatgtgattctnccntctgattgttttgtcatccnaatatttttttgtcacatatgagaggagctttag

SEQ ID NO: 4785 - DNA, 175 bp, Zea mays
  misc_feature: Incyte ID No: 700455781H1
  unsure 83-85, 106, 115, 124, 126: a, t, c, g, or other
catgtgcaggagttccttaattatgctaaattcgtgttgtggtggatttcattaggtgtggcttcatcaattggactaggtcnnnggttgctactttgtgctgtanctaggtccncatattgcncngttccactattaaagctgttcagtgtggccgaattgatttgaaaatggc

SEQ ID NO: 4786 - DNA, 119 bp, Zea mays
  misc_feature: Incyte ID No: 700455782H1
  unsure 33, 56, 78, 97, 102, 104, 110-111: a, t, c, g, or other
tctgtgtatggaggctgcttgaattgcatgtancacccaccgttggctaactatgnggtgtattttggatcctgcatnagaatctacagaatctatnccccngnggtttnnaaaaaaag

SEQ ID NO: 4787 - DNA, 183 bp, Zea mays
  misc_feature: Incyte ID No: 700455784H1
  unsure 3, 17, 23, 73, 137-139, 146, 170: a, t, c, g, or other
gcntcgttgagtcctgnacaganaggtggttgttattgtgggtgatgatcctgatggtctacttattgatgcncactactggaaagaccagttcattccataaaaggacatcgggactactacatttgctcggcttnnncaccctnatgggcgaacatttgctaccggcnaccaagacaagac

SEQ ID NO: 4788 - DNA, 194 bp, Zea mays
  misc_feature: Incyte ID No: 700455785H1
  unsure 13, 43, 48, 52, 90, 108, 123, 134, 167, 171, 181: a, t, c, g, or other
ttctcctaccagntcataggcacagcagaagaaagcgccaggngcttnaganctggcgaacaggggcttgacatctggctctgttacctngaccttctacgggctgtncgtccaatttggcanccgggcagatncctgttaccagggcttcaactgggagtcctggnagcngaacgggggntggtacaacttcc

SEQ ID NO: 4789 - DNA, 198 bp, Zea mays
  misc_feature: Incyte ID No: 700455786H1
  unsure 18, 75, 79, 95, 99, 104, 127, 135, 143, 149, 193: a, t, c, g, or other
ctggctatggcaaactcngcaacgatacctgaccgtacgtcctggctctgatcgggctagcgctcctaccgcgcngcanctaccggtttaccggncagnaacgncctgaggatgcccgccaagctanctgctgcngcaagtanggttantgcggcaccagcttcgattactgaaatgccaacacgtgccagtnccggc

SEQ ID NO: 4790 - DNA, 214 bp, Zea mays
  misc_feature: Incyte ID No: 700455787H1
  unsure 2, 23, 50, 60, 68-69, 73, 105, 145, 147: a, t, c, g, or other
gngagcagacaggaggcgccganagcccagcgtacggagattctaccgancgaccatggngaacgctnnccanggccatgaggcgaaaaagcccgctataccaangtcccgccctacctacctactgattacctaccgaccctananctagggcagggtaccctatagtacatggtccttacctatacctgacctacgacctggatctaacgta

SEQ ID NO: 4791 - DNA, 183 bp, Zea mays
  misc_feature: Incyte ID No: 700455788H1
  unsure 47, 94-95, 105, 118: a, t, c, g, or other
gctgaaaccagagcagtacattctgaaggttggtgaaggacaggctncccagtgcatcagcggattacacagctatggatatcccaccaccccnngaccctctcnggatcttgggtgntgttttcatgggagtctaccacaccgtcttcgactatggcaagctgagggttggcttcgcgcgtc

SEQ ID NO: 4792 - DNA, 211 bp, Zea mays
  misc_feature: Incyte ID No: 700455789H1
  unsure 22, 26, 42, 53, 55, 58, 67, 78, 84, 90, 111, 116, 130, 133, 135-136,140, 178, 184, 186, 190-191, 200, 208: a, t, c, g, or other
ttggtactgacggacaaaagcnaganctggttgttcataatntacaggccttntnaangacagatcngcatcaaggcncgctgncatacntgcccgaaacctgccttccangctgncagtttgtgtcctntgngnnaaanagtcggaggtcaaggttacaaggttcctacatacatgncacatnantacnnaagaggttnttctgggntta

SEQ ID NO: 4793 - DNA, 88 bp, Zea mays
  misc_feature: Incyte ID No: 700455790H1
  unsure 9, 17, 24, 44, 46, 56: a, t, c, g, or other
tactgtgtntggaggcngacttgnattgacatgttagccacccnancgttggactnaactaatgaaggtcgtcttttgggatcccttg

SEQ ID NO: 4794 - DNA, 177 bp, Zea mays
  misc_feature: Incyte ID No: 700455791H1
  unsure 10, 17, 22, 25, 37, 50, 78, 81, 112, 115, 118, 130, 172: a, t, c, g, or other
gaagattganttggccntcagngtntgaggattatcntgtgggcttccgnttggtacctttcttacagtagggggttnccncaacttcatgttgactggaagtacctctgcnctncgntttggtattgtncttggccttgcactgttgactctgggtatctcaagtttgagntcact

SEQ ID NO: 4795 - DNA, 187 bp, Zea mays
  misc_feature: Incyte ID No: 700455794H1
  unsure 91, 94, 120, 166: a, t, c, g, or other
gtcgtcttcgcgaggtcgaaatccccaaggcgaggcgttgaaaacccttaaccctctaaccacctacaaagcggcgcgaggcgggagagtncangtggactacaggaggcggcgggcganatgaagcttaacgtcaagaccctacaagggacaccaacttacgagntcgcggcgagccccgatgacg

SEQ ID NO: 4796 - DNA, 242 bp, Zea mays
  misc_feature: Incyte ID No: 700455801H1
  unsure 45, 52, 63, 66, 80, 82, 88, 95, 167, 183: a, t, c, g, or other
ctaattggaagcaccaccctagcaatatcaaccattaaccttccntctacantttatcatgcngcncgattctaattctncngactantcctagnaatcgctgtcgccttaatccaagcctacgttttcacacttctagtaagcctctacctgcacgacaacacatnatgacccaccaatcanatgcctatcatatagtaaaacccagcccatgacccctaactgggccctctcagccctcc

SEQ ID NO: 4797 - DNA, 275 bp, Zea mays
  misc_feature: Incyte ID No: 700455806H1
  unsure 6, 10, 36, 38, 132-149: a, t, c, g, or other
taagcnagcngcggccggagcatcttggagacaggnanaaggggtggtagtaggtgaaaccggaggcggcaggagagggagagggagcgagagtagaggccacgcctgcttgacagcaaggcccgtgcgctnnnnnnnnnnnnnnnnnnatatgggcgactctggcggctctgttgtgtcggtggacgtcgagcgcatctccttcggcggcaaggaacatcatatacaaaccaaccatggatctgtatctgttgccatatatggtgaccatgata

SEQ ID NO: 4798 - DNA, 277 bp, Zea mays
  misc_feature: Incyte ID No: 700455807H1
  unsure 29, 42, 44, 48, 63, 65, 96, 193: a, t, c, g, or other
tgctcaagccgagcaccgcagaaaaaganaaagaaaagccanangcanaggcaaaggaatcgnantcaggcaagcaaaaggaagaaccagctgctncggccggagatgtcgtcgcagctgatcgaggagcaccggtcgggcgcggaggtgcacgtcgggcacgagctgtgcgagcgcaagtcgcgcgagttcntggtggagctgggcctccccgacgggctcctcccgctgcccagcctggaacgaggtgggctacaaccggtcgacggggttctgt

SEQ ID NO: 4799 - DNA, 277 bp, Zea mays
  misc_feature: Incyte ID No: 700455809H1
  unsure 134: a, t, c, g, or other
ccgatccaaccgagtcccggcggcgatggcggcggcgacgaacgccgatgtggaggtggtcgacttcgaccttcgatgacgacgacctcatggacgaggacgccgggccagatccagcaccgccccccgcctcncgcctccgctccaccatcgcgggcgacgacgcgccgcgtaggaccaagggccgcggcttccgcgaggaccctaactcctccgctacccgcgacttcgcgctttggcgcggggggacgcgccgaccttcgattcgcttggcggc

SEQ ID NO: 4800 - DNA, 272 bp, Zea mays
  misc_feature: Incyte ID No: 700455811H1
  unsure 153-154, 159: a, t, c, g, or other
gttagttttttttgtaatatatcatttccatagaatttggcagtattcttctatttgtctgctgtaaatttatagatgtcaggacatgtactctacattcatgttcttctcaactggactgtcataagttttcttcacttctgcacaactagnngctcngcaggatagtgtgtatcggctttatgctaacttctatgcattttgcgctgaaagtgtttcctgctatatagattgaagaaagtgagcagttggggttagactgtatcatgttt

SEQ ID NO: 4801 - DNA, 271 bp, Zea mays
  misc_feature: Incyte ID No: 700455813H1
  unsure 63, 163: a, t, c, g, or other
gcatttatttgtcactgatcgttgatcagcctagctagctagcgctgttttcctgtgtgctantggcgcccgttcaatgtgcgcgttcgcagagggtgttccacttcggcaagggcaagagcgagggcaacaagaccatgaaggaactgctgggcggcaaggncgcgaacctggcggagatggcgagcatcgggctgtcggtgccgccagggttcacggtgtcgacggatgcgtgccagcagtaccaggacgccgggtgcgccctccccgc

SEQ ID NO: 4802 - DNA, 274 bp, Zea mays
  misc_feature: Incyte ID No: 700455815H1
caatggagttatccactcccgttgggagctcccttgctagaacagcgaccatgggccctcgttagccccagcttcaagataaccaatcaaatgcgtggcaggggtatgccacttgaatgccaatttcctcataggctaccatctgtagcttgttcaatgttgttaaacacacaaccttcacaacgaaccaaccataaagattgtggtttgcttcaggtgcaatgtacagaaaacctgatgcagtcgccagtatctttcagtgacttctctgttt

SEQ ID NO: 4803 - DNA, 274 bp, Zea mays
  misc_feature: Incyte ID No: 700455819H1
tttcaggatattgcagaagagggatgtagtctttggagttgatcgtagtgcaaaggtttcctttgctgattcctaccctcaagttgatgacgaaataatggcacaggtcagaacagtatttcttgatggccttcctccctcatgggatgaagaccgtgttaagaaatatctcaaaaagtatggagctattgagaaacttgaacttgctcgaaacatgccagctgccaagagaaaggatttgggtttgttacatttgatacgcatgataatgctg

SEQ ID NO: 4804 - DNA, 275 bp, Zea mays
  misc_feature: Incyte ID No: 700455820H1
  unsure 227: a, t, c, g, or other
ttccccactagcaaccgtccccacaatcctccgacgatgcctgccgcaccgacgctgttgcccccctgcgacgcggaggagccgctgctggcggagtcctccgaccgcttctccatgttcccgatccgtttcccgcagatctgggagttctacaagaaggcggtggcctccttctggacggcggaggaggttgacctctctgccgacgcccggcactgggacgaggngctgtcccccgacgagcggcacttcatctcccacgtgctcgccttctt

SEQ ID NO: 4805 - DNA, 273 bp, Zea mays
  misc_feature: Incyte ID No: 700455822H1
cattttggatcaagcccttttgaggcctggccgcatagacaggaagattgagtttccaaatcctaacgaggactcacgtttcgatattctgaagatccattcaaggaaaatgaacttgatgcgtggtatcgatctgaaaaagatcgcagaaaagatgaatggggcctcaggagctgagctcaaggccgtctgtacagaggctggaatgtttgctctccgtgagagaagggtgcacgttacacaggaggactcgagatggcagtggccaaggtg

SEQ ID NO: 4806 - DNA, 271 bp, Zea mays
  misc_feature: Incyte ID No: 700455823H1
  unsure 188, 268: a, t, c, g, or other
cgtccgtgacggcaccgacgtcgtgctctggaagtggtgcgagggcgacaaccagcgctggaagatccagccctactactgaaccaacggatgatatgaccatcgcgcccatcgatcgtgcacatgcatgcatacgtactagcagaataacaggggtcttatctcccgaggcgtctttgcatgcatgncagcagttgcatagataaagcaggagcgagacaaagggtgttcatgtatatgcagctgtatcactgtatgtatgtgccantgt

SEQ ID NO: 4807 - DNA, 272 bp, Zea mays
  misc_feature: Incyte ID No: 700455825H1
  unsure 76: a, t, c, g, or other
aagctatgtgcttccttatggacccaaacctaggaaggaatgtctgttcatgtccaatttcctcagaggtttgaangtattgataggaatgaccgatatgcaaacaggaacactgtgtttttcgatattaacttgagaggtcttgacggcattcaagggccagtttatgtgggaactggttgtgtgtttaacagaacggccttatatggttatgagcctccagtcaagaaaaaaaagccaggcttcttctcttcgctttgtgggggaaggaa

SEQ ID NO: 4808 - DNA, 248 bp, Zea mays
  misc_feature: Incyte ID No: 700455828H1
atgtttggcctgcagtctgtgctgctatggactatatggatcagtttgaccgtgatggtgatggtctcattgagaatgatggatttcctgatcaaacctatgatgcttggactgttcatggaatcagtgcttactgtggttgtctttggcttgctgcacttcaagctgcagctacaatggctcatcgccttggggatcggcactttgctgagaagtacaagctcaagtttataaaagccaaagcagta

SEQ ID NO: 4809 - DNA, 268 bp, Zea mays
  misc_feature: Incyte ID No: 700455829H1
  unsure 28: a, t, c, g, or other
tacctgtggatcttctgtatccataaangatcagatcccaaaacccattggtcaaactactgaatgcagtaaacagggcatatcttatatctgagattttagatccaagatgcagatcagcggctttgtcacccctattggtcctttatctgaagaaaatcacacgatcgacaagaatttgttgccgctggagtgtgaagggacaatggaatgccacacacgagacaacgatgctgttgggttggatgcaagagcggaaggtgttgtc

SEQ ID NO: 4810 - DNA, 265 bp, Zea mays
  misc_feature: Incyte ID No: 700455830H1
  unsure 2, 39, 213, 238-239, 264: a, t, c, g, or other
angcccagatctgcagagaggggggaggggactggagangccggggacgagcctcatgggtctgattggtgggtcccactcccgcatgcatcatgtatgcaccggccggccggccggcctacctgtcaccgcctctcgctgcgggggctacaggcctgcctgcctgcctgtcagtggccctcccttgttgccttgtcccgacctattaattgntgcatgacagatcgatccatggaannatgggtagatagatcaatcatcggng

SEQ ID NO: 4811 - DNA, 249 bp, Zea mays
  misc_feature: Incyte ID No: 700455831H1
  unsure 40, 69, 207, 240, 245, 247: a, t, c, g, or other
agttcgcgaacgagaatttccggcgaggcgagcaaggacntcctgtcccggcatccgttgccgcaagtnaacgacgccgcagccatccaagtacggcggcggcagcgtcgtgaacaccgcgttccctccgccgttgccctttccgcctcccgcgtcggtcaccacgtctggcggtggcggtggtgctggcgctggcaacgagcgcantcctcgtcggcatcgtcgccgccacggaccgangactnanca

SEQ ID NO: 4812 - DNA, 278 bp, Zea mays
  misc_feature: Incyte ID No: 700455833H1
  unsure 28, 163, 256: a, t, c, g, or other
ccaccacagcgagacgctggggaagctncgatctgcgagggcgccagggttcggcttgacccggcgctcatcgcgatgttcgcgcggcggggagccgctggagcaggtgatgggccgcgccgaggaggaggagctacccaagtacgagcccggcgcgctgcangtggaggggccggcggcgggtatgccggtgcccctggtggacgcagggttcctcaacgactacgtacccaccggcgggatcgggatgcacatnatgagggcgctgctcgagtcga

SEQ ID NO: 4813 - DNA, 273 bp, Zea mays
  misc_feature: Incyte ID No: 700455834H1
  unsure 202, 224: a, t, c, g, or other
gcagctggtgagcctctcgtcgatgattggagctgtctcaagtccacggttcgtacttttgaggcgcaatgtgggtcgttggcgcagtatgggatgaagcacatgcggtccttcgcaaacatctgcaacgctggcatccttcctgaagcagtgtcgaaggtcgctgctcaggcttgcaccagcattccttccaacccctggngttctatccacaagggttttancgcctaagaatcgtaagtgaggcgaaatatttcagccgctccaccgcaa

SEQ ID NO: 4814 - DNA, 271 bp, Zea mays
  misc_feature: Incyte ID No: 700455837H1
  unsure 54, 179: a, t, c, g, or other
tttgttgacgatgatgagaagtgcgctaacatttcgaatggcaagaagcgaganataagggttcacgttttcgttgcccagtgaagcagcgttctgtagcttccggtacgcttgtcaagtggacaaaggcattttccattaatgatgctgtaggcgaagatgtggtggctgaactgcanacagccatggagaagcaaggtctggacatgcatgtagctgcatgattaatgatgctgttgggacgctggcgggagcaaggtactacgacaaa

SEQ ID NO: 4815 - DNA, 268 bp, Zea mays
  misc_feature: Incyte ID No: 700455839H1
  unsure 187-188: a, t, c, g, or other
ctgaccatcattagagtctaggcctgcgaactgatttcgttccgtagataatgctgcatgtatggcatctcggttcttcccacagagatcatgtgatgtgatcgacctcgagaaattaaaagtagattgtgtactagatatggcgcaaatattacatgcgccatcttctaaagttgtactgattggnntgtaagggcgctgggtggtgttggaacggataccgtgtactgttttgttgcttttttttctctagtataatgattatgat

SEQ ID NO: 4816 - DNA, 267 bp, Zea mays
  misc_feature: Incyte ID No: 700455841H1
gttcagtcgctcaccattctgccgttcacacctctctcgctgcctttatttcctgttggcgacgctctcgccaggtcttcggcggcccgttcggcggcgactagcgcctccgtttgccaggtcttcgtcgtccgtttcgccgtcgactggtgcccagcagccaggtacatctggaagaatgggggtttaccttagcacaccgaaaactgacaaggtatccgaagatggggaaaacgataaacttaaattcggacttcatctatgcaa

SEQ ID NO: 4817 - DNA, 266 bp, Zea mays
  misc_feature: Incyte ID No: 700455842H1
  unsure 143, 152, 183, 202, 211: a, t, c, g, or other
gcaaacaagactcatttggatccctgttcaagtgggaatgacactgtaagcgtgcaaaaccatgaagttgaatcctcaagtacggtttcctcgtgggcaaggacagagcaaggaactgagattgctcatcatacgcccttagncaatttgangtgtccaagatttctcggatcaccatatgcnaagactttcagcaggaaangtcacaaanggttgggtgaaggcaatccaaagtgaatgggatcttctacagaaaaacctacctg

SEQ ID NO: 4818 - DNA, 265 bp, Zea mays
  misc_feature: Incyte ID No: 700455843H1
attactgtacagtctcatctgtgctgatagcaatacagcacctcaagatacggtgttatgtactttccatataacccagctgctttttgggcgcctaactcaattggtcctgggcgtagaacggtagaaggtgatagcagtatagcacccaagttcaaagtcctcgtccaggcaaatctgggtgcatatctcttaattaaaaagaaacctggttcacttgtttggaaacatgtttcgtgggaatgtggtttgatggtgtccataa

SEQ ID NO: 4819 - DNA, 265 bp, Zea mays
  misc_feature: Incyte ID No: 700455845H1
tctgaacaactcagcaatgcaaccatctgatttgggcattactacagagaagcattctggaaatcctagccagggagatgaaaataacacagtggacagttttcttgaaggaagaaagacgaataatgtatgtgcattgtatagtagttcaggaaaaggcaatgagatgaaccttaagcagcctgcaatgctcttacttctgcactggctgagactggccttgttactctaccatcacttttgactgctgtgttgctccaggcaa

SEQ ID NO: 4820 - DNA, 264 bp, Zea mays
  misc_feature: Incyte ID No: 700455846H1
  unsure 33, 222: a, t, c, g, or other
ggaggtgagccaccggaagcggagacgtgagtngtcgaccaaccccgtcgatccggctgcggcgcggcgtgctagatcgctaccgaccatggtggtggaggagatcgccgagggggtgaagaacctcaccgttaccggagatgcggcggcttcaggcggagaggggcagaggaggggcggcggcggcagcagcaaccgcatccaggtgtccaacaccaagangcccctcttcttctacgtcaacctcgccaagaggtatatgca

SEQ ID NO: 4821 - DNA, 268 bp, Zea mays
  misc_feature: Incyte ID No: 700455847H1
gaaacatagagagagcggttctacgtccgagtcgtcgcatcaggtcccctcgattcgccggcggcgccaccaaccaagctcatacatctgaattgactagtcaaactcagtgatctctttggggactaatcaaactcaagaactaagtttcatgtctgatctcgacgtccagcttccatctgcttttgatccgtttgcagaggcaaatgctgaggactccagtgctggtgctggatcaaaggactatgtgcacgtgcgtattcagcag

SEQ ID NO: 4822 - DNA, 273 bp, Zea mays
  misc_feature: Incyte ID No: 700455849H1
  unsure 148, 188: a, t, c, g, or other
ggcggttcgacacggaccaggacgggcgcatcagccgcgacgagctgcggcgcgccctgcgtgccatccgctcccggttcacggggtggaggagcaggcagggcatcagttacgccgacgctgacggcgacggctacatcgacgacancgaggtcgatggcctcatcgagttcgcgcagaagaacctncggcctacaagatcgtcgccttactgatctcacatggggcgcggcgcgcggcggtcggggggtgggacgcatagctcgccatgag

SEQ ID NO: 4823 - DNA, 271 bp, Zea mays
  misc_feature: Incyte ID No: 700455851H1
  unsure 2, 261: a, t, c, g, or other
cnttagttgatttcttgaagggactccttgaatttgatccaaataagcgatggtcaccattgcaggctctacaccatccattcataacaggagaatcgtttactggtccatatgagccaatacccgagactgcaagaattcctgttgctcgtgcagcagcaattgatcacaatcctggaggggggcactggctacattcaggtctttccccgcaggttggaagtgtaaacagatacctacctttgaataatgtctaccctnccaaaggttc

SEQ ID NO: 4824 - DNA, 101 bp, Zea mays
  misc_feature: Incyte ID No: 700455853H1
  unsure 38, 56-57, 83: a, t, c, g, or other
attttagtagctgttcaccttccactctttgtgtttanccggttgtatagaattannaggagactgagaagattaaatctctntgtatttaattttaaata

SEQ ID NO: 4825 - DNA, 268 bp, Zea mays
  misc_feature: Incyte ID No: 700455854H1
  unsure 40, 46, 186, 222: a, t, c, g, or other
gcgatgcaatcgatgaccctcaagaaaatggtcgaggacngctgcnccgacaaaggcataccgctccccaacgtcacctcccacatcctcgacaaggtcatcgagtattgcaacaagcacgccgagccgaccgggccgggcgacgcggccggcaccaccaacaggtccgccgaggatgagctcaanatcttcgacgcagacttcgtcaatgtagagcactcnaccctcttggacctcatcctggctgcaaactacctggacatcaagg

SEQ ID NO: 4826 - DNA, 266 bp, Zea mays
  misc_feature: Incyte ID No: 700455856H1
ctcgccaccgccatggacccgtacaagcatcgcccgtcgagcgccttcaacgccccgtactggaccaccaacttccggcgcccccgtgtggaacaacgacagctccctcaccgtcggcgcacgaggtcccatcctgctggaggactaccacctggtggagaagctagccaacttcgaccgcgagcgcatcccggagcgcgtggtgcacgcgcgtggcgccagcgccaagggcttcttcgaggtgacccacgacatcacccacctga

SEQ ID NO: 4827 - DNA, 235 bp, Zea mays
  misc_feature: Incyte ID No: 700455858H1
  unsure 11, 177: a, t, c, g, or other
tgctgagaganggctgcggacaaggagccaaggacgagccgccgagaggactagggtttagccatggcggccgaggaccagactccttgtaccaagctccgccccggcaaggcaaagacgcggaagaagccgaagagggacaagtggggacagcctgtctccgccgccgccgatgangagtcgtcggtggagccggagcaagagcacccggcgggggtagttgaggcggcagtac

SEQ ID NO: 4828 - DNA, 263 bp, Zea mays
  misc_feature: Incyte ID No: 700455859H1
ctactcgttcgccatggctgcctgctcctccaggctcctaaacctcactctgagctcctctttcctccgctcctgccgcctcgcgtccagctccctacttcccaccgcctcccgctgccacccggggtcgctccactccctccgcttctgctctgctgtccccgagtttgtcgatgtcgccgccgaccctgccgaggcggctgtatcctccgggcacccgtggccggagtggggcaacttccttgataagctgcgggccaagg

SEQ ID NO: 4829 - DNA, 251 bp, Zea mays
  misc_feature: Incyte ID No: 700455862H1
  unsure 19, 43-44: a, t, c, g, or other
ggcgccgatgtcatcctgncctacttcgcccgtcacgccgccnntgtgctgtgcggcatggggcccaagtaggaggcgaggcccgcccgccattcctgccctgcactgtcattgtggagttgagcgatgagttggcttatcgtatgttttgggggcctggcactggcagaggattgtccgaggccttggatctcttccaataatctgcgccgggagataataagttttggagttatcgcattcccggtact

SEQ ID NO: 4830 - DNA, 235 bp, Zea mays
  misc_feature: Incyte ID No: 700455863H1
  unsure 21, 177: a, t, c, g, or other
tgctgagagagggctgcgganaaggagccaaggacgagccgccgagaggactagggtttagccatggcggccgaggaccagactccttgtaccaagctccgccccggcaaggcaaagacgcggaagaagccgaagagggacaagtggggacagcctgtctccgccgccgccgatgangagccgtcggtggagccggagcaagagcacccggcgggggtagttgaggcggcagtac

SEQ ID NO: 4831 - DNA, 264 bp, Zea mays
  misc_feature: Incyte ID No: 700455864H1
tacacagtgctatgaggatgctaagctgatgaagctgtttcctgaaatcataagaacactgtatgaccaagatgtcctagctgaagatactgtcctgctttggttccgtaaaggttcaaaccagaagggcaggcaatctttcgtgaaagctctggagccgtttgtcaaatggctcgaggaggctgaggaggaagaataagtttttgatttggagaacggccgaatgctggcctaagtgttacttatattctgaagttagaagtt

SEQ ID NO: 4832 - DNA, 267 bp, Zea mays
  misc_feature: Incyte ID No: 700455867H1
  unsure 5, 39, 79-80: a, t, c, g, or other
tagtngccagccttgctttagtccattgactcgtcagtntgcggcttctactgcaccggctaactccgcaaacaactannacaatgcgtgctaccttccctgaatatgtggttgctcttactacaattgttggatctgtgcttttcacgatatttggtggtgtcggaattgcctgccttccattgggacttatattctcatttgttcgtcgtccaaaagctgtaattacacgctcacaatatataaaggaagcaactgaactgggaa

SEQ ID NO: 4833 - DNA, 267 bp, Zea mays
  misc_feature: Incyte ID No: 700455868H1
  unsure 64, 90-91: a, t, c, g, or other
tgagagactgcaaagggacttggcccttgagcttgtcgaaaatgggctggcaaagtatgttgantggagtgccaatatgcttgatgttgnngtaaaaataaagctgaagaatgcagaacttcaggctaaaaaggatcaattgagaatctggacagggtttaagccaccagcgacaaactcgaagcccattcatgaccagaaatttaatggaaaagtggtagaggttgtaagtggggatgcattattgtggctgatgattctgctcca

SEQ ID NO: 4834 - DNA, 266 bp, Zea mays
  misc_feature: Incyte ID No: 700455870H1
  unsure 43: a, t, c, g, or other
ggctcttccatccagggcaccaaggcccagccattcccatctngcagcctcaaaacctacactggcaaaggagaaatccgacaaggtcagcaccaccttgcagcggcctccagtgcttgctgtgccggcagctaaggcatcgccatccaccttgccgaggagtaagccatctccaaggcctagttctgacagttgcaaagcggcagcatcactgaaacctagcagtcagagggtcatgttgccaggtgctgctcaaggagacaaag

SEQ ID NO: 4835 - DNA, 105 bp, Zea mays
  misc_feature: Incyte ID No: 700455873H1
  unsure 76: a, t, c, g, or other
attattcagatcaaggttccttcgaagaaaaaagaggctcgggttacggtgacattggccaattgcaggttctgtncatgttgcttatgatgaaatatttggaac

SEQ ID NO: 4836 - DNA, 173 bp, Zea mays
  misc_feature: Incyte ID No: 700455877H1
tttcgaatcccgacaacctccctccccaagctgcttagccgccggctgggcctcagacctgcgtcaagcttccggcggcagcccatcgagcaccacaatggcgtccggcggagcggccatctcggcggggcctacaccgccgtcggcgacggcgtcgtcggttgagtggcacc

SEQ ID NO: 4837 - DNA, 263 bp, Zea mays
  misc_feature: Incyte ID No: 700455879H1
  unsure 68, 232: a, t, c, g, or other
gcacacacaccacaccacacctcctcgcttccactccgctcgtctgacatctcgtccccgtcctttcntttcgaagcctcgcgagccccgacgatggccaccgccgcggtgtcggtcgacgagaagctcgacaagcttcgcgccgaggtcgccaagctcgaccagatcagcgagaacgagaagtccgggttcatcagcctcgtgttcacgctacctcagtggggaagcgganagatcgagtggagcaagatccagacccctac

SEQ ID NO: 4838 - DNA, 261 bp, Zea mays
  misc_feature: Incyte ID No: 700455880H1
  unsure 144-145, 176, 186, 237: a, t, c, g, or other
acggccgatacagaagcacataaacacattcgacgaggtcacgactcacgaggggactcccgagtcccgagcgcacgcgcgaatcgccgcggacctcgccggaggcgcgacgagctcggatcccggcgatctagtcgccggatnngtcccgatggctcggcggtcgtcttcctcgncgtcgggganctggcggtacctgaacccggcgtactacctcaagcggcccaagcgcctggngctcctcaccttcctcttcgtcgc

SEQ ID NO: 4839 - DNA, 263 bp, Zea mays
  misc_feature: Incyte ID No: 700455882H1
  unsure 48, 236, 243, 245: a, t, c, g, or other
gacaacccgtccttctccttcccatcggctccacacaaccagaaggtncttcgcttcactctgccctgcgccgccgccaacgctgcagccgcagttgccgcagggggtaacttggacgtgctactcgcgactgctctcatctgttcccgcgtaggattcgttcacaatggcccgtgtgtatgtcggcaacttggatgcacgcgtgacttccggggaactcgaagatgagttccgtntgtttgnanttctgcgaatgtttgggt

SEQ ID NO: 4840 - DNA, 260 bp, Zea mays
  misc_feature: Incyte ID No: 700455883H1
  unsure 28, 40, 73, 91, 177: a, t, c, g, or other
acgtcaaaaggttactttgtctattgcngtcatggttcancctgtatctggcccagtgtgtcttttggaagtnaattccaaaaggtttgcngggaaatcttagtggcaggatcagaacagggtatggaagctggacaagttggtcttcgattagtgactaagggtgaaaggatgatnactgttgctaaagagtggaatattggtgcgactagtattgcagatggcaggtggcatcttgtaactgtaacttagatgccgac

SEQ ID NO: 4841 - DNA, 262 bp, Zea mays
  misc_feature: Incyte ID No: 700455884H1
agacaccctcttcccctctccactcccaatcttatcgtcgcctccctcgacgtcgctgctgcctccacttcaccatggcgcttcacgccccggtcctcgttctgaaggactcgctgaagcgggagtctggcgcgaaggttcaccaagccaacatccaggcggccaaggctgtcgctgacatcatacgcactacattgggtcccagatccatgctgaaaatgcttctggatgctagtggaggtattgtggttactaatgatgg

SEQ ID NO: 4842 - DNA, 264 bp, Zea mays
  misc_feature: Incyte ID No: 700455886H1
  unsure 2, 49, 177-178: a, t, c, g, or other
cnacacctagaggagaccaccaaagcagcagcgatatgagctccctggnggccgagatgaagtcggcctcgtccttcaacggaggcaggatgccatgaccgacccatcggtcgagcttataaacaagacataagctcgcgcacagtaagcaagagacttgatcaagcagatgcagtnngaagagtaaggttcatcgttatatagcgtagtagcaatcaatgcaagttatcaactgagtcgcatgagtgagttcatgcatggata

SEQ ID NO: 4843 - DNA, 260 bp, Zea mays
  misc_feature: Incyte ID No: 700455887H1
  unsure 2, 33, 58, 60, 233: a, t, c, g, or other
gnagcaaaaatgatgaagtcccatgctaagagnaatgctctacttgaagtagaatatnangaggaagtgggcactggtttaggtcctacaatggaattctatacattgataagtcatgaatttcagaagtctggtctaggcatgtggagaggggaacttccttgtaaatctggtacccatgatactcatgtttctagatttgtggttgcctctaatggacttttccctagacnttggtctgcttctgaagatcctgctcc

SEQ ID NO: 4844 - DNA, 259 bp, Zea mays
  misc_feature: Incyte ID No: 700455888H1
agaatgggatggttgatgaagcccaaaaattgttggatgaggcggaagctctgaagaagctggccacccgaccacaggctgttccagactctacaaaaatgagcgctcatgtccagataactgaccaaaagctgcgcctgtgtgacatatgtggagcattcttgagcgtatatgacaggtaaattcttgtttagctgctggatagatttatactactaggaccatggatatcgcagtgtttggtttgttttacagttcg

SEQ ID NO: 4845 - DNA, 260 bp, Zea mays
  misc_feature: Incyte ID No: 700455890H1
  unsure 23, 46, 55: a, t, c, g, or other
tgcggtggccaaccccggaagcngcggcgggcaaagcgcgcgacgnagagaagcntaacttcaggccgccggtcgctctacgcatcctgctccccgttctcgtcggagatccaccggggcagcctttctttccccttcctcaatcaagtcgatccaatttcgcgcgcgggtcgggctcgccttctcctccagtctccacctccaccagcgctcgaggtcgacggacgctacttcgcagcagttcttctttgcggtgcggc

SEQ ID NO: 4846 - DNA, 256 bp, Zea mays
  misc_feature: Incyte ID No: 700455892H1
  unsure 7, 22, 24, 152, 218: a, t, c, g, or other
gagcatnacttcaggtcatctnancccttctgagaaaacatggtcaacgtcttgaaaggagtgctatagaatgtgatcctgccatgaagcagtttctgctgtacttggatgagtccaatgccctggggaagaagttcatcattcaagacatncatgacactcacgtctttgtaatagcagaattggttaatgtcctccaggagcgagtgggtgaatantggaccaaaatgcttttcccttacccagaaatgaaaat

SEQ ID NO: 4847 - DNA, 257 bp, Zea mays
  misc_feature: Incyte ID No: 700455893H1
  unsure 16, 22, 36, 55, 63, 71, 73-74, 133, 155, 182, 213: a, t, c, g, or other
atctttactggtctangacatnaccagacgccagancttcgatcatatatcccgntgactagntgaactangnncccatgccgacaagaacattgtgataatgctggttggcaacaagagtgatctcgaggancagcgagcggtgagcactgaanatgccaaggagtttgccgagaaggagnacctcttcttcctggagacctctgcgctccnggcaacaaacgtagagagtgcttttcaaactgtcttgacagaga

SEQ ID NO: 4848 - DNA, 258 bp, Zea mays
  misc_feature: Incyte ID No: 700455895H1
  unsure 72: a, t, c, g, or other
ggttttcctccttagttgaagtcccatgggagggcgccacgacaatgtcagctctgttcgagttttgtatanaaaaagtactctcgacggaggtgtcttggcacgaggaagctaattaagagggaatttatggaatcttctgatggtaggaagtttgagaaactgcaccttggtgaatatgaatgggatacctacactgaggcatttaatcgtgcatgtaatttttcttctggactatcaagatgggccacgacctag

SEQ ID NO: 4849 - DNA, 266 bp, Zea mays
  misc_feature: Incyte ID No: 700455902H1
  unsure 2, 5, 31, 33, 39-40, 42, 46, 48, 52, 55-57, 60, 62-63, 66, 68, 72, 75,91, 104, 121, 172, 191, 193, 259: a, t, c, g, or other
tnganggaagattcacatcaacgcagatgtngnccccannancgantngtcngcnnngtntnntgngnttcngangctctcttgctctgcntctcctgcttgcnggcgccgcgaacgccgngccggctgctcgtaagcgtttttcccaaagatgaggcgtacttcgcgacgnaggtgatcggcctgcagananggtcgggctctttcccgaggagccggctcaacgacgggtactgcgactgcggcgatggaaccgatnagccagc

SEQ ID NO: 4850 - DNA, 278 bp, Zea mays
  misc_feature: Incyte ID No: 700455904H1
  unsure 2, 4, 145, 202, 214, 229, 239: a, t, c, g, or other
ancnacgccgccgccgcaagccgtccgccttgcccctcgaaggcttggtcctcctccttgtatcccgacctcccccgcgacagacccgtttccccgctaggctagagttatcgttcctctgcagcgatggcgatcaagcggaccnaaggcggagaagaagatcgcgtacgacaagaagctgtgcagctgcttcgatgagtanaccaaggtgttnatcgccctcgccganaagtcggctnccaagcagctccaagaatccgccggggcctcaggggcga

SEQ ID NO: 4851 - DNA, 277 bp, Zea mays
  misc_feature: Incyte ID No: 700455906H1
  unsure 187: a, t, c, g, or other
gctgacggaataaaagttgtaactgataaaggagaagagctcattgcagatgttgtcctatttgcgacagggcgcacaccaaactcccagagactgaacttgcaagctgcaggcgttgagattgaccgggttggagccatcaaggttgacgaatattctcgtacttctgctccctagtgtaatgggntgtgggtgatgtaacaaaaccggattaatttaacacctgttgcattgatggaggcaacttgctttgctaaaactgtgtttggtggccagc

SEQ ID NO: 4852 - DNA, 295 bp, Zea mays
  misc_feature: Incyte ID No: 700455907H1
  unsure 2, 8, 30, 39, 103, 125, 147, 227, 277, 283, 290: a, t, c, g, or other
cnggcggncgggcagccaatgccgtcgggngcgcagggntaggagcatggggcggagggggcgcgatcgtgcacggcttccgccgctggttccaccgccggancgaaggctccacctccaactcnaaccagccgtccctcgccggcnagggggaagcgggacgacggctcatcccgatcttcgaggtcaatcgaggacccgggatctccttcgggccttccgcggcnatcccgcgtgccccaagcggcaagattgccgctgccccttcgaagagccnacaggnaagaaanccatt

SEQ ID NO: 4853 - DNA, 274 bp, Zea mays
  misc_feature: Incyte ID No: 700455908H1
agtcttggattctgcagcgcattcttctttgttagctgttgatcctgtgaagtatggtaacgaaatgtccaatggtcaaatgctaccatgaagtgcaatctcagatctgtcagtcgaagtctcagctgaaaagagagctcggctgatttgattcacagaaatagtgaagtaacaataacccggcatgtaggtagctctccgacaactttgggcaagatttgatttgtgcccaatgttgatctttctggagcattggatggagattaggttggca

SEQ ID NO: 4854 - DNA, 274 bp, Zea mays
  misc_feature: Incyte ID No: 700455909H1
  unsure 11, 42, 55, 115, 140, 149, 157, 252: a, t, c, g, or other
gctcgagagcnaaccacccgcaagcccttactaatttagganacatatacatggngtggaacatgataagcgctgctacttcatttacaaagcagctatatctgtgacatctggnttatcttccccacttaacaacttgnctgtggatncccaagcnacaggggaaactatgctgatgtatccacatgttacactgaagtactccgtatagatcttacagcagtggatgccactagttaatagagggaaccnttcaaagaggttggcagagtta

SEQ ID NO: 4855 - DNA, 283 bp, Zea mays
  misc_feature: Incyte ID No: 700455910H1
  unsure 59, 135, 178: a, t, c, g, or other
ctgatcaaaccggtgtacccagccgtgcatgactgcattggttcggctcgccggaagancagcttcgcggagcagggtcggcatagcggcggcggcggcaccccctcctgtcggcttgtccgtgcagcgccggangggttccaggggcgtgagaaatggagacgggggcaagcaaggncggccgtggcgcctctggttggtcctggaaaggccctggaaccggaagcgggaaaacttccgcaattgtgcccggttgctgtccttcctcaaaggcaaaaggcta

SEQ ID NO: 4856 - DNA, 218 bp, Zea mays
  misc_feature: Incyte ID No: 700455911H1
  unsure 19, 123: a, t, c, g, or other
agcacagctagcgcctgcncccccttcgcctgtgatcatgtcttgcagcagcggcaagtgcgactgtggctccagctgctcctgcggcagttcatgcaactgcatgtccctaaacgtggagancgccgccgccagcagcatcaagaacacggtcctcggcgggccggaccaacaaaggccagcgcggcggcttcgaggcggcaaccgagggcggcggt

SEQ ID NO: 4857 - DNA, 252 bp, Zea mays
  misc_feature: Incyte ID No: 700455912H1
  unsure 184, 214, 245: a, t, c, g, or other
gaaacaagagaatggtgtttgtgggcgactcagtcaacaggaaccaatgggtctctctcgtgtgcatggtggaggcctcaatacctgacgacaggctcaagatacgcaccttcaatggctcactcatctccttcaaggcattggaatacaacgcaacgatagatttctactggtcaccactaanggtggagtctaaacagcgacaaccccattntccaccgggtggagtaccggatcataagggnagacaga

SEQ ID NO: 4858 - DNA, 260 bp, Zea mays
  misc_feature: Incyte ID No: 700455913H1
  unsure 32, 34, 63, 65, 91, 100, 120, 139, 154, 166, 168, 177, 179-180, 189,192, 195, 213-214, 226, 256: a, t, c, g, or other
gcctgccctgtcctgccttgttaagcaacacngngagacatcacgagatctagagagagatgncngccacggtttcctccttcccggtggngaacatggngaaagctggagacagagganagggccacggccatggacntcatccgcgaggttncgagaaatgggncntctccgagngnntgaaaccanggnatntcgaacgaactggatggnncaaggtggaagnggctgaccaaaggggcaataaggccacttnccgg

SEQ ID NO: 4859 - DNA, 251 bp, Zea mays
  misc_feature: Incyte ID No: 700455915H1
  unsure 165, 176, 241: a, t, c, g, or other
ccaccacagcgagacgctgggaagctcgatctgcgagggcgccagggttcggcttgacccggcgctcatcgcgatgtcgcgcggcggggagccgctggagcaggtgatgggccgcgccgaggaggaggagctacccaagtacgagcccggcgcgtgcaggtggangggccggcggnggtatgccggtgccctggtggaacgcaaggttcttcaagataagtaacccaccgcggtatcgggntgacattatg

SEQ ID NO: 4860 - DNA, 258 bp, Zea mays
  misc_feature: Incyte ID No: 700455917H1
  unsure 35, 37, 65, 110: a, t, c, g, or other
gagttcgtggggagcggcgacgaggggaagcggantntgcggcgggccgggaagaaggagatctncgcgaggctcgccaggcctgtgccttttggcgacggcaagaaggnattctggttggacaagaacaaagggcatgatctgtatggcatgtcgtccaaagcactggtgattactggggattgatgacagaggatactggcaacacatgccaacttcagaatcgagattccagtctgtagcctaccttcagcaaat

SEQ ID NO: 4861 - DNA, 261 bp, Zea mays
  misc_feature: Incyte ID No: 700455918H1
  unsure 12, 39, 84, 127, 202, 205-206: a, t, c, g, or other
gttctggtactntcttctctctccctgctgacccaagtnccacgcctgcgtctcgtgatgccgccgaaatcgaaggcgtccgcngccgcggagccggtggccgtcgaggacctcttcgcctcgctcnaccgccacatcgagggcaggtgctttcaaacaaggccgcaaagtcgcggaccaagttctcaaggcagcggccggnatnntgaggacgcggtgcgatgcaaggtggtggccatacatcaagggccgacgagatcg

SEQ ID NO: 4862 - DNA, 209 bp, Zea mays
  misc_feature: Incyte ID No: 700455920H1
  unsure 146, 168: a, t, c, g, or other
gagggatctgccgactcccttgctccacgcgatgaacaccgacatcaccgcctcgactaagccggagtacccggtggtggatcggaacccggcctttcaccaaggtggtcggcaaattctctgcggctcgactacatgcgctctcnacatcttccgcggtctccgtcnaccgttggctactctccgggatcaagccggggatccggggc

SEQ ID NO: 4863 - DNA, 253 bp, Zea mays
  misc_feature: Incyte ID No: 700455922H1
  unsure 196, 252: a, t, c, g, or other
tgaagcttggtattaaatactgctacaacagaccatgtgctctgtatgctgctcctgatcctttcggacaagaagctgagaaatcattaactgagggcaataagggtgaaactacaactatgatcaaattaacagcaaacctgagcagtgccttttcccacggttcagtccggatggggaagtaatcttgtcttcnatctcagcgaagagtgctgtagatagtggggcacacaatggccacaattcattgcnt

SEQ ID NO: 4864 - DNA, 246 bp, Zea mays
  misc_feature: Incyte ID No: 700455925H1
  unsure 147, 200, 208, 232: a, t, c, g, or other
ttgctcgctcgccaaagagttcttcttgttaggcaaggcaaaagcataagcaaaaagagaaaggtcttgttgccgatggggagctcagggttctcgtggacgcttccggaccaccccaagctccccaaggggaaaccggtggctgtngcgtgctggacggatggggcgaggcaaaccccgacagtacaatgaatcatgtngctcagantcctgtcatggactcgctaaagantggcgctcctgaga

SEQ ID NO: 4865 - DNA, 252 bp, Zea mays
  misc_feature: Incyte ID No: 700455926H1
  unsure 2, 30: a, t, c, g, or other
gngcgggatatccagaaactttgttgtttncaggaccccgactcaagttgcaagccatgctcaaaagtactttgttagacagacaaactcatcgagacggaagaggcggtcaagcttatttgatatggtcccagaaatgcccatggatgagtcccccagctgctgtggaacaatttactcctccaaaatactccaagatgaagatacagttccaaatcagtgccaaccttacatcttggacaacggaaggaa

SEQ ID NO: 4866 - DNA, 263 bp, Zea mays
  misc_feature: Incyte ID No: 700455927H1
  unsure 6, 137, 139, 191, 222, 248, 250: a, t, c, g, or other
tgaaangcgcccaacaagctttgtcaagaggaatttatcaatcaattcctcttgggaaaggcgcccaacaagctttgtcaaacagttgataaattgcctacatttctgccagcattatttgatgctttaacaaccanantcccagatgtcccgaaagactgttgtggttctgcttggtggataatgtaccntccatgccttggggaaagccattccgctccnataacttggaaagggcttaagcagcnangcagctcggccta

SEQ ID NO: 4867 - DNA, 262 bp, Zea mays
  misc_feature: Incyte ID No: 700455929H1
  unsure 29, 167, 198, 213, 229, 252, 260: a, t, c, g, or other
gtcgtagcggctcgtccagctcgctcgcnaccgccatggacccgtacaagcaccgcccgtccgagcgccttcaacgccccgtactggaccaccaactccggcgcccccgtgtggaacaacgacagctccctcaccgtaggcgcacgaggtccatccctgctggaggnctaaccacctggtggagaaagctagccaaanttccgacgcggagcngattccccggagcgcnttggttgcaacgcgcttggcgcnacgccaangg

SEQ ID NO: 4868 - DNA, 250 bp, Zea mays
  misc_feature: Incyte ID No: 700455930H1
  unsure 11, 122, 178, 190: a, t, c, g, or other
tgctggaaganaggagaaggaagggtcgctacataccatgcaagattctcttagaattgcatttattaaggagcagtatgaatcgaaggtccaagagctgaaaggtcaagtttttgtcagtnaaaaatatgccgaagagatgctgctgaaactgcaaagtgctttggatgatgttganactggggaaganaatgagattgccccttgccaagagattgaggagttgtccgatgaagtttcggaatggagt

SEQ ID NO: 4869 - DNA, 267 bp, Zea mays
  misc_feature: Incyte ID No: 700455931H1
  unsure 2, 14, 220: a, t, c, g, or other
cngcgcctcccgtnctcctcttccatccgtcccgcgcggcaacgtgccggcgtcgggtctgtccgctgcatggctcggcgaccggattcctcctattccccgctgcgttcggggcagggcggtgaccgtgcaccgactgaaatggcgccgctgttccctggttgcgattacgagcaatggctcatcgtcaatgggacaaaacccggggggcgaagggcgncaacaaagcaagcaaatgattgattgctaaaatccaagaacccttgg

SEQ ID NO: 4870 - DNA, 256 bp, Zea mays
  misc_feature: Incyte ID No: 700455932H1
  unsure 46-47: a, t, c, g, or other
cttccgcaagcatatgcctagacttcaaccagagaatattgtcaannatgctaagatattcgagcatgtgaatgcaatggcagctaaaaaaggatgcacaccatcacagctagcattggcatgggttcaccatcagggaaacgatgtttgccccatacctggaacaacaaaaatcgagaacttcaaccagaacgtgggggcgcttctgtgaagttgacaccagatgagatggccgaactcgatcctgtgctgctgc

SEQ ID NO: 4871 - DNA, 261 bp, Zea mays
  misc_feature: Incyte ID No: 700455933H1
  unsure 35, 258: a, t, c, g, or other
tcgagcagctgttggtgtcactccattctggacanccgtatccaagggccacatagatcaggttaacaagctgctagaacgtggagaaaggtccaaggggatgaggaagtacaatgctatcgacaagtggaatactcagctgaagtcccatttaccaaacattgtcccaacagagtttgatgaggaggatcgctgctgctgctgcgtgcattgcacacctagaattgttgataagcctgttttgtggatttgagggcnact

SEQ ID NO: 4872 - DNA, 251 bp, Zea mays
  misc_feature: Incyte ID No: 700455935H1
  unsure 22, 59, 69, 71, 94, 151, 191: a, t, c, g, or other
tggaccacctcgccgccgagangtcggccgcgcgcttcgatgtcgaggcgatgaaggtngcatgggctngntcgcgacacgccgtcgaagatcngcgaccgcatggcccgactcgttcgcgtccgaccctgtcttccgcaaggataacagnccatgctcttccaggaaggacttgtttaaggacactctangaaaggcagcccatgcatgggaagcgtattgtggaataagtctcacagaggaggaagcag

SEQ ID NO: 4873 - DNA, 251 bp, Zea mays
  misc_feature: Incyte ID No: 700455936H1
  unsure 2, 157, 230: a, t, c, g, or other
gnctgcagccacgaactcccgttctccatttccagccatggcggtgtcgatcgagctcaccaaggagtacggctacgtcgtgctggtgctggtggcctatgtcttcctcaacctttggatgggcttccaggtcggcaaggcccgcagaaactacaangtgttctacccccaccatgtacgccatcgagttcggagaacaaggacgccaagctcttcaactgcgtgcattnggggcaccagaactctctaga

SEQ ID NO: 4874 - DNA, 270 bp, Zea mays
  misc_feature: Incyte ID No: 700455937H1
  unsure 4, 19, 22, 35, 44, 56, 102, 129, 143-144, 146, 151-152, 156, 196, 200,203, 210, 213-214, 226, 241, 244, 268: a, t, c, g, or other
ctgngaagtaagtcgaggnganacttctctcttgngtattaccntgatagctgacnctcttgctgtcttgtggagaagcactgcttgagaccagcaaatgantccttttgcctggtttctaaaaggagnctgataggggtganngnctgcnntgtnccctagagcttgatttttcaataacaggtgtcggatagcntctnccnaagagtncannctaaaaacccantctaaaatccgtgcntcnagaggaggtccatttgcaattaantt

SEQ ID NO: 4875 - DNA, 253 bp, Zea mays
  misc_feature: Incyte ID No: 700455938H1
  unsure 26, 28, 60, 62, 106, 183: a, t, c, g, or other
gagctgggcctgccctgcatcgagangnccggcgtcgcccacaagatcgacttccgcgangngccccgcgctccccgtcctcgacgacctcatcgcggaggagaanaaccacgggtcgttcgacttcgtcttcgtggacgccgacaaggacaactaaccttcaatacccacgagcggctgctngaagctggtgaaagtggggcggcctcatcggctacgacaaacacgctgtggaacggcctccgtcgtgctc

SEQ ID NO: 4876 - DNA, 247 bp, Zea mays
  misc_feature: Incyte ID No: 700455939H1
  unsure 45, 194: a, t, c, g, or other
ttcgggactatgacattattgtgtcgatggttcctcttccttctncatcagttcttccaggcccttcaggcccaattcattttggaccaccatcttattcctccatgacaccttggatgaagctagtactgtatacagcaggacatgtggaccagtatctgctgtgttcatgaaagggctacgttttagatgcntgcctgaaccattagctggttgtggagaaggcactgctaatggtcttgggatg

SEQ ID NO: 4877 - DNA, 254 bp, Zea mays
  misc_feature: Incyte ID No: 700455940H1
  unsure 18: a, t, c, g, or other
tctttgtcgtcaagaggnatgctcaacccagattccagttcattgtcatgaatcgcaggaatacagataatctagttgaagatcttttgggagattttgaataccaactacaagctccttatataatgtaccgcaatgctgctccagaagttataggaatctggttttaacaattccccaggagtggtcaacaggttgcaaatccttttccagcaggattcctgaatgctttcctccaaaggtggcaccaaagc

SEQ ID NO: 4878 - DNA, 254 bp, Zea mays
  misc_feature: Incyte ID No: 700455941H1
  unsure 2, 41-42, 89, 140: a, t, c, g, or other
cnctttgcctcaattctgccaaagcgatcggctgcactgtnnttcaacatcggcacacaagacctcgccgaagggaggcctcatctggncctgggcttaatatctcaaataatcaagatacaactgttggcaaatgttanctgaaaagcacaccctccaattagttgaattggttgagggacagtaaaggagatggaggagcttaatgaggtttaatctcctgaaaagattctactagggtggatgaactttca

SEQ ID NO: 4879 - DNA, 243 bp, Zea mays
  misc_feature: Incyte ID No: 700455942H1
tgtaaaagcccaaagcttgacaatatattcccgcggaacccaaggtgtatcaaattggaggcagcagagagtgcgtgcaaggcaggatcagacaagaaatcacttttcaggtacaaatatttcagtgttgcaaaggatgccaagggaggtataacttcagctgatagcgggtgtatcctcccagatttagactttcccagataatttgagatgctccaaatgcagacatagacaacaacttct

SEQ ID NO: 4880 - DNA, 251 bp, Zea mays
  misc_feature: Incyte ID No: 700455943H1
  unsure 211, 250: a, t, c, g, or other
ttatttctcttcctcctccaaaccaccgatgtcgctaccggttctatccctgcgctgccattgctcgtccgcatcctccttggatttccctcccaggaaggttagggttttctgatgcgctcatacatggggcagcaagaagatgggatgtctgatggcttgtacacttacaaagcatcacggcgaagcggaggagctgatatccaacacnatctttgtgaagaggagcaaattccaggattctgctgtna

SEQ ID NO: 4881 - DNA, 255 bp, Zea mays
  misc_feature: Incyte ID No: 700455944H1
ctgggaagaagtcgaggagaaacttctctcttgggtagtacctgatagctgacactcttctgtcttgtgagaagcactgcttgagaccagcaaatgattccttttgcctggtttctaaaggaacctgatagggtgaaagactgcaagttcctagagcttgatttttcaatacagatgtcgatagcctctccaagagtccattccaaaaacccattcctaaaatccatcatccagaagagtccatttgcataaaat

SEQ ID NO: 4882 - DNA, 252 bp, Zea mays
  misc_feature: Incyte ID No: 700455947H1
  unsure 10, 230: a, t, c, g, or other
tatgatagangaggaagtgtgtccaagcagcgaaaccttaactgctgttgtttctgtattcgccaggcacaaatttcttccccatggcaagaagctgcactcctttgctattaggagtgggctcatggacacaatcttggtagcatcattgttgacctctatgcgaaatgcggtgagttagtgtcatcgattcagttgtttgagggaattcaatggggggaagctagtanttaagggtcagccatgatatgg

SEQ ID NO: 4883 - DNA, 248 bp, Zea mays
  misc_feature: Incyte ID No: 700455950H1
  unsure 67, 93, 146, 177, 192, 200: a, t, c, g, or other
gatgactttagcaaaggcgtatgtcatccttgcaaaagagcatgataatcttcagcttgcatgggancttagttcgcagataaggaattgtcnaagattgctctctgaaggggcagttagtgggagagcaatcactaaagatgaanccatcctataataaagccggctagcactgtnaatatacaaggctcnggactccnactatgatatcagcacaccaatagtgacattgaagaaccatgccctgg

SEQ ID NO: 4884 - DNA, 243 bp, Zea mays
  misc_feature: Incyte ID No: 700455952H1
  unsure 4, 141, 234: a, t, c, g, or other
aggngcggcgagcgcaaaaacaagacaaagccaaagcaaaagcttgcacagctattcaacctcggggaacgtgctgggtagagtcgttgagccattttcgtctccaacagtgcaggagccccctgaacctgcaagcgaganaaagaccccagcatccaataggggtgttccagcagcgctgcccagcggcttaccgtggacgctggactgccagtgttgcctgggttagatgantattggacg

SEQ ID NO: 4885 - DNA, 245 bp, Zea mays
  misc_feature: Incyte ID No: 700455953H1
  unsure 22, 24: a, t, c, g, or other
tcgcgcgtcggcaccgtgagananagccttaaaactgcaaagaaggattttaccaagactgaggacgacttaaagtctctgcagagtgtggggcaaataattggagaagtactccgacctcttgataatgaacgctttatcgtgaaggccagcagtggtccccgatacgtggtcggttgcccgaagtaaatggacaaggagaagttgacatctggtaactcgtgttgtacttgacatgacgacct

SEQ ID NO: 4886 - DNA, 252 bp, Zea mays
  misc_feature: Incyte ID No: 700455954H1
  unsure 22, 24, 39, 145, 203: a, t, c, g, or other
tcgcgcgtcggcaccgtgagananagccttaaaactgcnaagaaggattttaccaagactgaggacgacttaaagtctctgcagagtgtggggcaaataattggagaagtactccgacctcttgataatgaacgctttatcgtgnaggccagcagtggtccccgatacgtggtcggttgcccgagtaaaagttggaccaaggnagaagttgaccatctggtaactccgtgttgtacttgaacatgacgaccc

SEQ ID NO: 4887 - DNA, 249 bp, Zea mays
  misc_feature: Incyte ID No: 700455955H1
  unsure 35: a, t, c, g, or other
tctttgctggtctatgacattaccagacgccagancttcgatcatataccccgctggctagatgaactacgagcccatgccgacaagaacattgtgataatgctggttggcaacaagagtgatctcgaggagcagcgagcggtgagcactgaagatggccaaggagtttgcccgagaaggagaacctcttcttccctggagacctctgcgctcccaggcaacaaaacgtagagagtgcttttcaaactg

SEQ ID NO: 4888 - DNA, 241 bp, Zea mays
  misc_feature: Incyte ID No: 700455956H1
tgaaaccaaccagaagtgttccactttcgacgtggtcacggccataatcttcaaatgccgcgccttggcagtccgacttcgcgcccgacgctgaggttcgcttgggcttcgcagccagcactcgccacctgctgggcaatgtgtgccctccgtcgaaagctattacgggaactgtgtgtaccaggtggtctcaccaagaccagccaggaggtgaaggaagcttcgcttgtggagattgtga

SEQ ID NO: 4889 - DNA, 180 bp, Zea mays
  misc_feature: Incyte ID No: 700455957H1
  unsure 133, 162: a, t, c, g, or other
ggcatgcgtcagaccttccagagctgccccattgccagaagagcaaagatcaacaccaggtccaggggcagcagcagtagcgtggcgaaggggtcacaacaaccagccctccaagttccagtgcaagggcgtngactttcgcggcggacaccagcctccggntcgagctggacgagaacc

SEQ ID NO: 4890 - DNA, 251 bp, Zea mays
  misc_feature: Incyte ID No: 700455959H1
ctccctagtcgctccccaaatcggatctccaggccggcagaagttgagcggactgactggtcactgtagttcgttcgaatccgagtagggctgatacagttcgattcggcgggaggcatggcgtccgaaaagcactttcaagtacgtcatcctcggcggcggcgtcgcggcggggtaacgcggcgcgggagttccgccaagcaagggagttaaagctgggggagcttgcaaatccatctcccaaggaggct

SEQ ID NO: 4891 - DNA, 253 bp, Zea mays
  misc_feature: Incyte ID No: 700455961H1
  unsure 6-7, 74-76, 213, 217, 219-220, 249: a, t, c, g, or other
taaggnnctacttcgaggaccgccgcccggcgtccaacatggacccctacgtggtcacctccatgatcgccgannncaccatcatctggaagccctgagcgcggccgttgcgttgcgctgcattgcagatttgcagggtccccgaagcgattgcaaagccattgtttcctttccgtttctgtttgctaattataattaataataatctaagcnagancnntccgggggtccaggtcgtcgtggtgtgcnaaaa

SEQ ID NO: 4892 - DNA, 251 bp, Zea mays
  misc_feature: Incyte ID No: 700455962H1
  unsure 2, 61, 98, 219, 245, 248: a, t, c, g, or other
gnttctccctcctcctcgctcgctcgatcgctcccacgtcctcgcctccctccacaaaccnccaccaccatccaggatcgcagcgcggcgcgcgaganaggggtgagcaggtcgggcaagatgagggagatcctgcacatccagggcggccagtgcggcaaccagatcggcgccaagttctgggagtgatctgcggcggagcactgcgtcgacttcaangggccgctaattcggggaacttcttngcnagc

SEQ ID NO: 4893 - DNA, 250 bp, Zea mays
  misc_feature: Incyte ID No: 700455963H1
  unsure 2, 237: a, t, c, g, or other
gncgccgtgcgctcgctctctctgtccctcaaggccttcgccggcgaagagcgcctagtcacccaccaggatgaagtttgttgctgcttacctgcttgctgtccttgctgggaactccagcccctctgctgaggacttgacggccatctggagtcagttggctgtgaagttgacaatgaaaagatggagctcctgctgtcccaaactgatcggtaaaggacattaacgagtcattgngcgggcaagggag

SEQ ID NO: 4894 - DNA, 250 bp, Zea mays
  misc_feature: Incyte ID No: 700455964H1
  unsure 104: a, t, c, g, or other
tacaagttccggtccaatttggaggccttttcaaggaggatgaccctgagttcacaaccttggacactgtcactgagctcactatcaaaccatcgtcgaaaganaccattgagatccccgtcaccgagaactccgcgattgtatgggaactccgggtgtcggttggggaggtgagctaacagcgccgagttcacccctgacaccgagggtgggtacatgtcattatacagaaaacaaggaagtgccgcta

SEQ ID NO: 4895 - DNA, 162 bp, Zea mays
  misc_feature: Incyte ID No: 700455967H1
  unsure 42, 155-156, 158, 160-161: a, t, c, g, or other
ccgtcatctactctaccatctttgcaggcacactcatcacancgcttcagctcgcactgattttttacctgagtaggcctagaaataaacatgctagcttttattccagttctaaccaaaaaaataaaccctcgttccacacaacatctcgaccnncncnng

SEQ ID NO: 4896 - DNA, 243 bp, Zea mays
  misc_feature: Incyte ID No: 700455968H1
  unsure 16, 65, 219: a, t, c, g, or other
gctcgagcgcaggctntgatgccgatgcgcaccaggcgctcgcgcaggaatatggaatcaaggantttcccactattaaggtgttttcccctggtaaacctccagttgattatcaaggagcaagagatgtaaagccgattgtagagtttgctctgtcacaggtcaagtccccttcttagagataggttgagtggtaaggcatcagcagggtcaaatggnaagacatctggaggctccaagtga

SEQ ID NO: 4897 - DNA, 237 bp, Zea mays
  misc_feature: Incyte ID No: 700455970H1
  unsure 46: a, t, c, g, or other
attttctacgatcacttcttcgactgggggttcaaggacgaaatcnccgccctggtggcggtgcgcaaggcaatggcatcacgccgacgagcgagctcaccatcctcgagcacgacggtgactctacgtggcggagatgacggcaaggtcattgtaaagatcgggtccaggtacggacgtcggccatctcatcccggcgggttttgaggtcgccgccacggcaaacgactaagccgt

SEQ ID NO: 4898 - DNA, 236 bp, Zea mays
  misc_feature: Incyte ID No: 700455971H1
  unsure 196, 210, 223-224, 229: a, t, c, g, or other
cacaaccctctccctcttccatctcatttccgctgcggctgcaacaataaaataataagtctcgtgcaggcgaaggacgtacgacgacgcggacgcaccgtcaaagtctacaggctgcgcaatccctttctccctcttatccccaaggcgaggagctgaggggggggggggccttctgctgctgttttgtttcccngttctcaaaatttngtccccgagaaanngcggnaaaatgg

SEQ ID NO: 4899 - DNA, 243 bp, Zea mays
  misc_feature: Incyte ID No: 700455972H1
  unsure 16, 24, 89, 96, 104-107, 109-110, 191, 197, 231: a, t, c, g, or other
tttctcctcggctganctggtggngtttgctgagctgttttggaacccaggggtgctgatccaggctgaggaccgcgtgcaccgcattngacagancagcttcnnnngnnctcactacctcgtggcaaagggcacagctgatagactacctttggccctgattcaagagaagattaaagttctggcagaangccggngctttctgagaacaatttttcagaaatgacagantccaactgatta

SEQ ID NO: 4900 - DNA, 247 bp, Zea mays
  misc_feature: Incyte ID No: 700455974H1
aaagaagaagcagcagaagaaggaagaacagcaaaggctggacgaggaaggtgctgccatagcagaagcagtcgctcttcatgtcctcataggcgaggactccgatgaaccctgccatttgatgctgaacaagcaccatataaggtgcaaccattggggcccccctcgggctgcctttgaaattcaccgtggacgcaacagcccgcccgaggtgtaacccgtctgaggatggactgggtatgcggca

SEQ ID NO: 4901 - DNA, 244 bp, Zea mays
  misc_feature: Incyte ID No: 700455975H1
  unsure 90-91, 237: a, t, c, g, or other
tccagtgctgatgtatcagcagcagcagcaaacttccagagtttaagcctacataatgatgagttagctgcaaaaaagtctgcagaagannaccctgcagtgataattcctgaccacttgcaagttacaaatacagaatgtgtcaagttgagcttggcagttttgggatctggtgcattttcctggggttactccccacaaaataaccatgatagcaatgtggaattcccctgctcngagagga

SEQ ID NO: 4902 - DNA, 240 bp, Zea mays
  misc_feature: Incyte ID No: 700455976H1
  unsure 6, 45, 223: a, t, c, g, or other
tttggnacaaacaagctaaagtatcctgtacatagcatccttgtnttcgatcagcacaaaaatgcaattcctgttgcgtggattataacccccaattttgcacatggtgaaatatataaatgggtgggtgctcttatgatcgaggcgcatacaaaagatcctacttggcaatgggtggcttcatattgatggtcccttgactgacgttcgcacaataaggagnagtaattccattggccc

SEQ ID NO: 4903 - DNA, 228 bp, Zea mays
  misc_feature: Incyte ID No: 700455980H1
  unsure 25-26, 43-44, 64, 84, 199, 204, 224: a, t, c, g, or other
atgcgaacaagattaacccattggnntccggtggatcttgttnnttgatcactcagtgcaggtngatgtagcaaggtcgcagantgccgtacaagcaaacatggtgttgttggcaaatttgttgattctatggtgaaggtatgggtaagctgtctttagctgacaggggccacaattgcgaacatgtcaccagaatatngagtnaccatgggcttcttcctgtnggac

SEQ ID NO: 4904 - DNA, 247 bp, Zea mays
  misc_feature: Incyte ID No: 700455981H1
  unsure 2, 21, 54, 56-57, 79, 157, 183, 246: a, t, c, g, or other
cntaaaggaaagattggaggnagagcgcaggaaggagaatatggaaaaattgcncnnagatatgatgaaatccaaaggnccaaactgtggtgctcaccactggtttgaaggaaaaaaaatctgtttcagacatgatggatggtgctgatgaggaggnagagaggaagcattgggaagattttnggttttctgaggatgatgaagatgaagacgaaggagaagatgaggaggtggctcattttggcnt

SEQ ID NO: 4905 - DNA, 257 bp, Zea mays
  misc_feature: Incyte ID No: 700455982H1
  unsure 10, 32, 44, 92, 133, 143, 159, 166, 172, 178, 209, 244, 247, 256: a, t, c, g, or other
ttaaagcagnagcagcagaagaaggaagaacngcaaaggctggncgcaggaaggtgctgccatagcagaagcagttcgctcttcatgtcctnataggcgaggactccgatgaaaccctgccaattgatgctgnaacaaagcanctattaaggttgcaancattggngccccntcgggntggctttgaaattcaccgtggacgcaaaganccgccgagtgtaaccctcttggagattggactggncangcccgtcanc

SEQ ID NO: 4906 - DNA, 241 bp, Zea mays
  misc_feature: Incyte ID No: 700455983H1
  unsure 14, 25, 56, 60, 68, 75, 81, 84, 111, 127, 130, 145, 149, 151, 194, 213,216, 218, 225, 229-230: a, t, c, g, or other
cctctccggacggnaagtccctgangctctggatgagacaacagctcgggcagcgngttnaagtctgngcgggcntaccgnaanggctacttcgccgcgtccgtcaaggtncaggcggggtaaaacngcnggcgtcaacaccgcnttcnanctgtcgaacagcgaggagtacccggggcaccacgacgagatcnacatagagtgctggggacngtncnggggganccgnnacacgctgcag

SEQ ID NO: 4907 - DNA, 79 bp, Zea mays
  misc_feature: Incyte ID No: 700455985H1
tcttgtttgcctcttgtgtaatatccctaagatgaacattttggtaatctgggtgctcattcaattggttgatttgatc

SEQ ID NO: 4908 - DNA, 240 bp, Zea mays
  misc_feature: Incyte ID No: 700455987H1
  unsure 2, 40, 44, 119, 121: a, t, c, g, or other
cnattgtcgatttacttccaggcactccatacaacatgcnaatncgccaattgctgcaaggcaggagttgtaaatacctttaaccaggacccagcaaatgctgcttcctccttccagancnagtgttggtcttgctggaataaccaataaaactgttaaggtgccaggaacttcactcttaagactccaggccctgggtacacatgtggggcgtgccattgttggcaggcctacaaagtt

SEQ ID NO: 4909 - DNA, 229 bp, Zea mays
  misc_feature: Incyte ID No: 700455988H1
  unsure 8, 56, 61-62, 140, 212: a, t, c, g, or other
cgggagancgggacgttcaaggtggtgcaggtggcggacatgcactacgcggacanccggnncacggcctgcgaggacgtgctcccttcccaggtggccggctgcaccgacctcaacaccaccgccttcttctaccgcgnctttccgcgccgaggaccccgacctcgtcgtcttcacaggtgataacatctatggtgctgattcaactgatncagccaatctatggatg

SEQ ID NO: 4910 - DNA, 240 bp, Zea mays
  misc_feature: Incyte ID No: 700455989H1
  unsure 9, 57, 89, 103, 120, 145, 182, 187: a, t, c, g, or other
tagaatggnaagagaaagggagaaggaaagaatacgaattggaaaagaacttctggnagccaaaagaattgaggagcaaaatgaaaggnaacgcatgataganctgcgaaaacttgaganagaggaggagaaaagagctagaganaaaatcccgccagaagttagaagaagataaggctganaaggngaaggaaactaggactgccaccagaagacccagcagctgccaaaccagtgcac

SEQ ID NO: 4911 - DNA, 62 bp, Zea mays
  misc_feature: Incyte ID No: 700455991H1
  unsure 25, 27, 32, 38, 48, 50, 61: a, t, c, g, or other
ctgacccgggccacactccgctgcncngccanggcganccgctcagantnccacacaacana

SEQ ID NO: 4912 - DNA, 246 bp, Zea mays
  misc_feature: Incyte ID No: 700455993H1
  unsure 2, 29, 58, 101, 196, 213: a, t, c, g, or other
gngaacagtcagactatagaatatttgantcagagcttaagcagagagaaagatacanatccacccggtatcatctatcaaacggcttgtttttgatgcanatgagggaaatttagacattagagctggaaatccaaacgagcagtctgtgagattgcaggaaaacaactcatcctgatagtcctaataaggtttngtccctaggaggatcgntcatcccttagtggcggtgttggatctccaaaa

SEQ ID NO: 4913 - DNA, 217 bp, Zea mays
  misc_feature: Incyte ID No: 700456001H1
  unsure 4, 28, 55, 153, 186, 196, 213: a, t, c, g, or other
aggnagcccaagtgctctcttgggtgcnctcgtcgccggtggcagtgagccagtncatgcatcttcatctccggcttccttattaggatacagcccgtcgatcgatcatgggcgtcgtcgagctcggctgctactaccagtggtgacagtcanggtctcaaggctcgagatgcctgcatcgtcggngttgcccgcnagcccatcggcgcattntcgg

SEQ ID NO: 4914 - DNA, 119 bp, Zea mays
  misc_feature: Incyte ID No: 700456003H1
  unsure 44, 65, 68, 70, 106, 112, 114-115: a, t, c, g, or other
ggagattggagagtattttcttcttctttacaagaacaactggntggatactgccacggccaaangcncnagatccaaccagtgggttgtaaatgtttcaaaatgngtaccnannggac

SEQ ID NO: 4915 - DNA, 275 bp, Zea mays
  misc_feature: Incyte ID No: 700456004H1
  unsure 169, 173-174, 204, 207, 235, 240, 261: a, t, c, g, or other
cttatcttgggggcgatctcgtcggacatgcgcacgacaaagcatacgtagcagaggacggcaacaagaactgctcaaccggtttcaagataatgcttggtaagcttctgccgaagcttgttactgccttctgtgaggccggtatcaccagcgacccgtaaaaccagcncaanntgctctctgctgcatcagcaatataaaganggntccaattcattgctgatgcagcagagancaggnttgcgctgcatcagcatgganttgggacctcttat

SEQ ID NO: 4916 - DNA, 282 bp, Zea mays
  misc_feature: Incyte ID No: 700456006H1
  unsure 269: a, t, c, g, or other
cctgatcagagatctggaaaggttgagctccagtatttgcatgattatgctggagttaatgcaagcatcggtctgacagccaatcctgtagtcaacctctctgctgcctttggtactaaggctgttgcagttggtgccgatatctcacttgatactgcaactgggaacttgactaaatacaatgctgcactgaggttcactcatgaagaccttgtcgcatccctgaacctgaacaacaagggcgacagcttactggagctactatcacnaggtgagcggaat

SEQ ID NO: 4917 - DNA, 283 bp, Zea mays
  misc_feature: Incyte ID No: 700456008H1
  unsure 43, 118: a, t, c, g, or other
tccagttctatgtaatatgattgaccgtgataatggtcatagnaaggatggatgctttatagttttaccaaagcatgcacctgtgctgtctatccgaagctcaatggacatgccttcntgcttggaaggctcctctcagggtaaaaataatctaaacatatccaatatttacaacaatggtaagtttcagattgattcttcccaggataaaccaagatcactgaagcaaattggcagtggcatgaagctcacttgagcagtgctcactgttttccaaatctta

SEQ ID NO: 4918 - DNA, 103 bp, Zea mays
  misc_feature: Incyte ID No: 700456010H1
  unsure 25, 96-97: a, t, c, g, or other
ctccattccttcctcctttgccaangcagctctgatctctcctacctgagaatgtcagtgtgagtggccattccatctgcacaacatccttcttcnncacaac

SEQ ID NO: 4919 - DNA, 281 bp, Zea mays
  misc_feature: Incyte ID No: 700456011H1
  unsure 40, 43, 221: a, t, c, g, or other
tctggtgcaaattcgtacatttgctatggctgtgcttcanatngctaacaatatttgttatttcagtaaaccagaaatacttcaagacgtgcccaaggaaacaaaaaaaaggaaggtgtcgtcaatgctgttgaggcgcttcttaatcaagagaactattcaaaatccacccatatgcctgataacatgcaacaaccagagactcaaaattgtcataaganataagactacatgtttttgctatgcatttgatgcctatagatctgaagctgccgaaaagg

SEQ ID NO: 4920 - DNA, 283 bp, Zea mays
  misc_feature: Incyte ID No: 700456014H1
gagcaggtcatcaacaaagacaagtcttctgttcactaaaaatacgagaagtgagacgaagatggcggtcatgcaagctcctaaatttaacacaagggactttcaacgacagatatctgggcttaccagttcgctttgggcagtccaggacaaaaacttcttagtacttaaatgataatgtgacaacgtattcaaggttggaaagaaaagctgctgtcaaaagccagtaaataagtggctgataaaggccgtagcacaggattccaacatatgctatgggatg

SEQ ID NO: 4921 - DNA, 277 bp, Zea mays
  misc_feature: Incyte ID No: 700456019H1
  unsure 26, 55, 184, 188, 261, 273: a, t, c, g, or other
aagcaacctcgccaaaaccctacgcngctcaactatgctcatccggcgaccgctnccaaaccctcaccctccccctcctccgccgccacttctccgccgccaccgtcgaggcctttgtgtcccccgaccaagccaccgacccgctctccccgccgtacgactacctcccgggccacccgcggcnagangctaagcacaatgaggtgatctcgccgtcccgcgcgctcttgggggcgccacgtagccgccaaggagcgcaangcgggcgggtcncgca

SEQ ID NO: 4922 - DNA, 277 bp, Zea mays
  misc_feature: Incyte ID No: 700456021H1
ggaagaggaggaacaacaaattttaaaaggtgatgaggtgattgttgaactggatgcttcattagaggacttgtacatgggcggttcattaaaggtttggagagagaaaaatgtcataaagccagcaccaggaaagaggcgctgcaactgtaggaacgaagtttaccatcgacaaataggtcctggaatgtatcaacagatgactgagcaggtctgcgaccaatgtccaatgtgaaatttgtacgagaagtgaatcttgactgttgatattgagaag

SEQ ID NO: 4923 - DNA, 280 bp, Zea mays
  misc_feature: Incyte ID No: 700456022H1
tggaatagagtgaaggtccggtactgtgatggtggatctttcactggtgatggctctgatgcggctgcaggcctttatttccgaggtcagcgcatttggcaggccgctatggatgacctaatggcccaaggaatgcgttatgctaatcaggcccttctttctggatgctctgccggtggtgtttctaccatacttcactgtgatgaattccatgggattgtttccctcgaataccagagtcaaatgcctagctgatgctggaagtttcttgacactgttg

SEQ ID NO: 4924 - DNA, 107 bp, Zea mays
  misc_feature: Incyte ID No: 700456026H1
  unsure 3, 40, 45, 91, 94, 100, 106: a, t, c, g, or other
tcnccgcctccgctaacgagcaagccaaggcggcccaaanagganaagaaggtggaggtccaagatctggcacggccggcggcggctaacncgnagcttnccggtnt

SEQ ID NO: 4925 - DNA, 281 bp, Zea mays
  misc_feature: Incyte ID No: 700456028H1
  unsure 64, 78, 124, 249: a, t, c, g, or other
aggaacagagcagacgacgcgaggcgatttctgcgggtttgcttgctccatctgtagaccttangccgccgccgggcnaccgtgcgcgtgcggtgctcacgccccaccccgctcaggtgaaggncccttcaagatgggcgaggtacacgaagctgacaagaacattgagatctggagggtgaagaagttaatcaagggcacttgatgctgcaaggggcaatggaattagcatgatttctctcatcatgnccacctcgtgatcagatttcacgcgtcactaa

SEQ ID NO: 4926 - DNA, 277 bp, Zea mays
  misc_feature: Incyte ID No: 700456029H1
  unsure 45: a, t, c, g, or other
ttccccactagcaaccgtccccacaatcctccgacgatgcctgcngcaccgacgctgttgcccccctgcgacgcggaggagccgctgctggcggagtcctccgaccgcttctccatgttcccgatccgtttcccgcagatctgggagttctacaagaaggcggtggcctccttctggacggcggaggaggttgacctctctgccgacgccccggcactgggacgaggcgctgtcccccgacgagcggcattcatctcccagtgctcgccttcttcgt

SEQ ID NO: 4927 - DNA, 280 bp, Zea mays
  misc_feature: Incyte ID No: 700456031H1
ctgcttcacgctctacctcgacgagggcgccgagatcctcgcgtcccaggacatgaagcattggcccctgatagctcccctgccgtcctacgggagaggaagggacgagcctggcccaaggtacatcaatttcatcggaggatccaatctcactgacgtcatcatcacgggcaaaaatggaacgatcaacgggcaggggcaggtctggtgggacaagttccacgccaaggagctcaagttcacccgcggccacctcctcgagctcctctactctgacaaa

SEQ ID NO: 4928 - DNA, 281 bp, Zea mays
  misc_feature: Incyte ID No: 700456032H1
gatagggttctcgatactccgatcactgaggcgggcttcactggcattggtgttggtgccgcttaccatggtcttcgacctattgtagagttcatgacatttaacttttcgatgcaggcaattgatcacataattaattcagctgccaagtcgaactacatgtctgctgggcagatatctgttcctattgtctttaggggtccaaatggtgctgctgctggagttggtgcccaacactcacagtgctatgcagcttggtatgcacatgttcccggattgaa

SEQ ID NO: 4929 - DNA, 278 bp, Zea mays
  misc_feature: Incyte ID No: 700456036H1
tgggaagaagtcgaggagaaacttctctcttgggtagtacctgatagctgacactcttctgtcttgtgagaagcactgcttgagaccagcaaatgattccttttgcctggtttctaaaggaacctgatagggtgaaagactgcaatgttcctagagcttgattttcaatacagatgtcgatagcctctccaagagtcattctaaaacccactctaaatcatcatcagaagagtcatttggcataaatttggactccaactccaacagtttttctatat

SEQ ID NO: 4930 - DNA, 279 bp, Zea mays
  misc_feature: Incyte ID No: 700456037H1
  unsure 25, 91, 144, 183, 185, 187, 247, 272: a, t, c, g, or other
atggagctcttcttttgatcgcagnaaatgaaagttgtccacagccccagacatcagagcatcttgctgctgttgaaatcatgcgtcttanaacatatcatcattctgcagaacaagatcgatcttatccaggaaagcgcaggntggaatcagcatgaagcaatccaaaaattcatccagggncnanagctgaaggtgcacctgtggtgcctatatccgcccagctgaaatacaacattggatgttntctgtgaatacttgtgaagaaaatnccccatc

SEQ ID NO: 4931 - DNA, 277 bp, Zea mays
  misc_feature: Incyte ID No: 700456038H1
  unsure 43, 128, 167, 246, 249-250: a, t, c, g, or other
tgctatctgcgtttctcggcaattgcctgttcagctacccgcngccgcctcttctacccgcaacaacggctgccccgagaccgagcacgcgtctcccggttccctttcctgctcgcctcaggcccgcntccctcgtcgcccgacggctgacggcggaggcgggggangcgctgagcgcgttatccgccgcggagggcgacgacgaatacgaagcggagttccaggaggaagggtttccgagctggncgnncggcggcgaggaggaggactacgacca

SEQ ID NO: 4932 - DNA, 278 bp, Zea mays
  misc_feature: Incyte ID No: 700456039H1
ccctggttgcccagagggtacgatccctgcacggagaagtactccacgaagtactacaacctacctgaggtgcagagagctctacacgccaatgtcaccggaataccgtatccctgggtaacctgcagtgacccagtgtatgatttttggaaagattcaccgaggtccatgcttcctatctaccgtgaactcattcgccgcgggcataaggatatgggttttcagtggcgacgctgattccgttgtccgctcaccgcgacaaggtactccattgacgc

SEQ ID NO: 4933 - DNA, 276 bp, Zea mays
  misc_feature: Incyte ID No: 700456043H1
tggtgttggacggagggggaggggacgtggatggcggggaggattacgtggagacgcgatactacgatggcctcataggcatcgacaagcagcatcacacgactgggacaggctttatcaaagtggagagatccaatggcagcaccttcagtgtgatgactaacggctacccacctgccagctctgtccgctgcacgagcaatcctgcgacaaatgattggataccatcttctgaatcgatcatccctgcttcgaacaagcccagcaggagcgact

SEQ ID NO: 4934 - DNA, 282 bp, Zea mays
  misc_feature: Incyte ID No: 700456044H1
  unsure 46, 80, 148, 186, 209, 258: a, t, c, g, or other
cacgcacgcaaactcaaaggagtgtgaccacggaactgaagccatnggcggttacagttgagaagggctctatgggcganccggcgctgctgctggagcgcagccgggcgatcaccctgcacggccgtgaccggaagggccgtgccgnacgtcaggatcgtcggcaactactttccagcgcgcgcnctggggcggccggggcggaggangcgctgcggtccgtacctgcgggagcgcatccttcccggagatcgggancgcgagttcgtggtcgtgtacatg

SEQ ID NO: 4935 - DNA, 228 bp, Zea mays
  misc_feature: Incyte ID No: 700456045H1
  unsure 29, 40, 83, 134, 209-210: a, t, c, g, or other
tcggcgagattccgaagttgtcgggagangtccggacctntgggacgacagcgtacgtcagccagttcggcgtggatacagancggcaaaattcaggagaacatactgttcggtatggagatggacagagacangtacgacagggtgctcgagtcgtgcgcgctcaagaaagacttggagaacctgccgtttggcgaccagacatcatnngcgagcgaggcatcaacc

SEQ ID NO: 4936 - DNA, 277 bp, Zea mays
  misc_feature: Incyte ID No: 700456046H1
caaattgtgcagggtaggcagctcgtctcagcgattaccagccgcagacacaagagcaccttgctgtgaacttgtaacaggtttgaacttcgaaggaaaagataattttggtgctgtgattgatttcactgtgaggagtgaaatgaggctaagtattgggcaagtccatcgaaatgttcttgcgctggcatcttcttcggtcatgttttgttctgggagatcgtgtttcgttcaggatgctgtcccaaccacgggtagctggatttcatcagactgt

SEQ ID NO: 4937 - DNA, 256 bp, Zea mays
  misc_feature: Incyte ID No: 700456047H1
  unsure 42, 62, 124, 202: a, t, c, g, or other
tcccatcccactaccacccatctacgtcgtccgccgattcanatccggttcttccaacccangggctgtgatggcgacgaagaggagcgtgggcaccctcggcgaggcggatctgaaggggaanaaggtgttcgtgcgcgccgacctcaacgtccctctcgacgacgcccagaagatcaccgacgacacccgcatccgcgcntccgtccccaccatcaagttcctcctcgagaagggcgcaagtcatctcgccagc

SEQ ID NO: 4938 - DNA, 283 bp, Zea mays
  misc_feature: Incyte ID No: 700456048H1
  unsure 13-14, 62, 230, 245: a, t, c, g, or other
caactggccagannaggataaggcatatgaatcgttgcaagaattgagagcagtgcgtgatngcaaaaaacgcatcctccatgcataaccgtacagttttaaccagagctagggattattcttcaaggaatatgctgacagaattgcaagagctccacaaaactgaggtcgacaagttcatgacccaatggtgtgaaagtaaggcttcagagaggactacgagaagagantcctcacatccctanatagccgacagctgactcgagatggtcggatgaggatc

SEQ ID NO: 4939 - DNA, 273 bp, Zea mays
  misc_feature: Incyte ID No: 700456049H1
  unsure 36: a, t, c, g, or other
agtgtgtggaactccaagtggagcgctcttattatnctcatggggatactttaatgattgcagtgaccgctttctcggacacacgcagtctgtggatacaatgctgaagctggatgaagacactttggtttctggatcatcagatggtgtgatcagattagtgggcatcctacctaataggataaaacagccacttgctgaacattcagaataccccattgaggcccttgctttgtcaaacgacaagaatattaggcagcatctcacatgata

SEQ ID NO: 4940 - DNA, 276 bp, Zea mays
  misc_feature: Incyte ID No: 700456050H1
  unsure 106: a, t, c, g, or other
aacggatttcactgagcttgcaaaccaggagccgtggctctcatctatgaagttggttgtgaaacctgacatgctctttgggaaacgtgggaagagtgggcttgtngccctcaacctagatcttgcccaagttcgccaatttgtcaaggagcggttgggagttgaggtcgagatgggtggctgcaaagctccaattacaaccttcatagtttgaaccatttgtgccacatgaccaagagtactacctttcgattgtatctgaaaggcttggcaaca

SEQ ID NO: 4941 - DNA, 276 bp, Zea mays
  misc_feature: Incyte ID No: 700456051H1
atcagaggaagacaaatcatctgagcctagtcttgaatactggtttaagtgcatcgatcttgatggtaatggtattttaactttcaatgaaatgcaatttttctacgaggagcaattgcaccgaatggagtgcatggcacaagagcctgtgctttttctggacatattatgccagatgattgatatgattggaccagagaatgagagctatttaactctacgggacttaaaaacggtggtaaactctcaggaaacatattcaatattctttccatc

SEQ ID NO: 4942 - DNA, 165 bp, Zea mays
  misc_feature: Incyte ID No: 700456052H1
  unsure 44, 46, 80, 112, 146, 159: a, t, c, g, or other
tcgccctcgcctttgttgatctcttcctctctcgcgttcccctngncttcctcttcctcccccacacccaccggtccgcngcccccgtcgccccggcctcctcggtccaganacgagggggtccgcgccgtttccgacgccacacngcaaccgcatcanatcaat

SEQ ID NO: 4943 - DNA, 273 bp, Zea mays
  misc_feature: Incyte ID No: 700456053H1
atcatagtgatcattattattcaaagccagaatcaagaaaggttcaggcggtaaaaaagccatcaaaagactgggtcaaacgtattcagcatgagtggaaagtcttagagaaagatttgccagatactatatttgtgagggcatatgaggatagaatggacctgcttagagctgtaattatgggaccagctggtactccttaccatgacgggctcttctctttgacatttacttccctcctcagtatccaatgtaccaccgatggtgaattac

SEQ ID NO: 4944 - DNA, 276 bp, Zea mays
  misc_feature: Incyte ID No: 700456055H1
  unsure 6, 131, 134, 160: a, t, c, g, or other
gcgaantgccaccggaaggagaaggagagaagcgagagtctccccagccagagcaagccgaatccgaagctagcggagaggagagagggctgagtgaggatgccgacggttacctgcaacgcgtgcaacgnggngttcgacgacgaggagcagcagcggncttcactaccgctctgaatggcaccgttacaacctcaagcgcaaggtggctggagttcctggtgtcacagaggctctgtttctggctaggcaagctgctttggcggaggggaacaa

SEQ ID NO: 4945 - DNA, 275 bp, Zea mays
  misc_feature: Incyte ID No: 700456056H1
ctcaacacattgcctgtagccgaacccggccaccgtagggagcatgccgaccgcgcctgctacttgctgttcattctggccgcatggccattgccacaggcacttggctgcatggccatctctatctgattttgttcttttttatttcttggttctagccttaacgaacgtccagcatgcctcctctgtgttatattttttttcagccgcacaagaacagcttcctgtttatcgatctgtctctcttccttctctctctgcgagttcgcctgtct

SEQ ID NO: 4946 - DNA, 274 bp, Zea mays
  misc_feature: Incyte ID No: 700456058H1
  unsure 31: a, t, c, g, or other
caggtttggtcaaggagaatcactggtgttnagtgatgggctagttcaagggactgaagcatttgctccagggtttggctttcggggtttctggtgttttaagaaagccagttgagagtgccagacagtatggtgttataggtattgcacctggcattggccgtgcttttgtgggtttcattgtccaacctttaagtggggctctggattttttttcactgacggttgatggaatcagtgctagttttatgagatgtgttaacattttaagtaa

SEQ ID NO: 4947 - DNA, 271 bp, Zea mays
  misc_feature: Incyte ID No: 700456059H1
aactatgcagctgcctactgcactggccttctgttggctcgccgtgtgctcaagacccgtggtttagataaggaatatgagggcaatgttgaggccactggtgaggacttctctgttgagccagctgatgagaggaggcctttccgtgctctcttggatgttggccttattaggactacaactgggaaccgtgtctttggtgccctcaagggagctttggatggtggactggatattcctcacagcgagaagaggttgctggtttcaagaa

SEQ ID NO: 4948 - DNA, 274 bp, Zea mays
  misc_feature: Incyte ID No: 700456061H1
  unsure 25, 61-88, 266: a, t, c, g, or other
attcgctcacctctgctccgcctcnccccatctccccacagatctcgtcgcgatgggcctnnnnnnnnnnnnnnnnnnnnnnnnnnnnctcctcctcctcgccgtatccggggtcctcctcagtcctgcggcggcggagatcaagcaggagtccttcaaggacgactcccgcggctccatcctcttcgagaagttcggcttcggcctccacggcatggtgtctatctccgtcacggcgccaagtactccttccaagctcgctaagncgaccccg

SEQ ID NO: 4949 - DNA, 273 bp, Zea mays
  misc_feature: Incyte ID No: 700456062H1
  unsure 18, 179: a, t, c, g, or other
cttgaagtccggacagtngccgcagctgaccgtctactctgccggccactccctgcaggtgttcgtcaacggccagtcctacggcgccgtgtatggcggctacgacagccccaagctgacatacagcggctacgtgaagatgtggcaggggagcaacaagatctccatcctcagcgcanagtcggcctccctaaccagggcacccactacgagacgtggaacgtcggagtgctcggtccggtcacgctgtccggcctcaacgaggggaagcgg

SEQ ID NO: 4950 - DNA, 274 bp, Zea mays
  misc_feature: Incyte ID No: 700456063H1
  unsure 36-37, 64, 161, 170, 175-176, 179, 183, 186, 188, 200, 203, 233: a, t, c, g, or other
ttccttctgccaagcacaacacagaccatcgtctgnncgcccaactgcacccgccgccgtcgcntcccaaaacccaaccaaaccctagattcgccgccctcagctccggtcagaccctccccccttcgaagatgccgaacctcgagtgccggatgtatgancagcggttnccggnngtngatnctncngtgatgatccangtnaagcacatcgctgacatgggcgcgtacgtntcctgctcgagtacaacaacatcgagggcatgatcctcttc

SEQ ID NO: 4951 - DNA, 205 bp, Zea mays
  misc_feature: Incyte ID No: 700456064H1
  unsure 31, 47, 71, 76, 79, 99, 102, 118, 126, 179: a, t, c, g, or other
agtgatcacagcatcagctctgaggaagaanatatccttgtcagganctgtagccaatctcaatgtgagcnctggntancattgtgattctcattcagngcntttctcctgaaaatgntcatgggncatggcatttctcctaaagaacacgtttggggactaaataccaatgatggggncacgaaatgggctcattccactggtt

SEQ ID NO: 4952 - DNA, 274 bp, Zea mays
  misc_feature: Incyte ID No: 700456065H1
  unsure 25, 35, 214: a, t, c, g, or other
cagaagagcagcgcctgagctccancaataatctncgagaagggcgtgaaggtgttggggatgtgggcgagccccatggtgatcagggtggagtgggcgctgcggctgaagggcgtcgagtacgagtacgtcgacgaggacctcgccaacaagagcgccgacctgctccgccacaacccggtgaccaagaaggtgcccgtgctcgtccacgacnggcaagcggtcgcggagtccaacatcaatcgtgggagtacatcgacgaggtctggaaggg

SEQ ID NO: 4953 - DNA, 224 bp, Zea mays
  misc_feature: Incyte ID No: 700456066H1
  unsure 215, 222-223: a, t, c, g, or other
agcgtggggatggccatcctcccgtgtttagcaactccagtccctctctcttcggctatgatctaacaagctctggagcccagcaaaccccggcgagcaagctaaagacggagctttgagcgacgatggatggtagacagcattgtcaggagagcaggctgaacatatgcggtgggggcgcacagcgacatgattccagcaagttgatcaggttncgctacnna

SEQ ID NO: 4954 - DNA, 271 bp, Zea mays
  misc_feature: Incyte ID No: 700456067H1
  unsure 247: a, t, c, g, or other
ccggatgcagggacaaggacctcgcccacatcgaggcgcacatggaggccttcaacaagaagggcggggacgtcaagtggcacatccacgacgaccgatcgctgctcgcattgcagggtcctcttgctgcacctactctgcagttgctgacgaaagaagatttgagcaaaatgtacttcagtgacttcaagatgatgacatcaatggatatgcatgctttctggacgagaactggctacaccggcgnagatggttttgagatctctgttcc

SEQ ID NO: 4955 - DNA, 272 bp, Zea mays
  misc_feature: Incyte ID No: 700456069H1
  unsure 172: a, t, c, g, or other
agcgagccagcgaccggcaacagttttctcggaaggcagcctcttcctcgtcgccgccgacgtcacccgccgcggctgtccggggatgccggtcagggtggtcgataccgccacgccttcctcgcagccctccccagggcaagaagcaaatactggacacccatctcctccnagatgttcactcttaagtgctggaagatcttttgctggaactcagaatgtttcaagtctgcagaaggatgaagcatggaaagtgaatgtccgcatccatg

SEQ ID NO: 4956 - DNA, 272 bp, Zea mays
  misc_feature: Incyte ID No: 700456073H1
ggaagagcactgccagtttgcatgccccctttgctccaagtcggtttgtgacatgtcgaaggcatgggaaaggctcgacatggagctggcaactctgtctgactcctgtgatcacaaaatggtccgcatattatgcaacgactgcggggcaatatcagatgtgcagttccatttgattgcgcacaagtgccagaattgcaagtcatacaacacccgccagatttgaagtaagaatcgcaagtcacacaacaccgtcagatctgaaatagcaa

SEQ ID NO: 4957 - DNA, 226 bp, Zea mays
  misc_feature: Incyte ID No: 700456074H1
  unsure 15: a, t, c, g, or other
agaggtggagaaagntgagtccctattgcacaagctatctctgaagaacaacgtcaagcccagttacagctcatacatgacactgcttgatagctactcgaagaaaggagacgtccacaactcggagaaagtgttcaacaagttgagacagataggctacactgggaggatcaggatgtaccagttactgctccattcttatctacatgctaaggccctgcgtatg

SEQ ID NO: 4958 - DNA, 270 bp, Zea mays
  misc_feature: Incyte ID No: 700456076H1
attatggacatgcggcagctccaaatgaccggactttgaatgatggagacatggcactaatggatatgggagctgaataccatttctatggatctgatatcacatgctcataccctataaatgggaaattcaacagaagtcagacaataatatacaatgctgtgcttaaggctcataatgctgttatatcagacatgcggcctggagttaattggatggatatgcacaaattagcagaacgggcaatacttgaatctctcaggaaggaac

SEQ ID NO: 4959 - DNA, 238 bp, Zea mays
  misc_feature: Incyte ID No: 700456077H1
  unsure 13, 16, 61, 90, 115, 165: a, t, c, g, or other
ccatttcccagcngcngcggcgccacgcagacctagcagagaaacacccacccgagatggngatggctctgcgccgccttgcggcgtgtncggatcgccgtcggcctcctctgcngcggccacggtgctactccggtcggcgctgacccgcccgatctccacggnttcgcgagaggcgacacttcgtccatcaagcccaagaaagttggggggaagaagacgtgagacttgaatgggg

SEQ ID NO: 4960 - DNA, 272 bp, Zea mays
  misc_feature: Incyte ID No: 700456079H1
tccaactggcaggaaggaacgtgatggccaagacgagctcgttcaagctggagcacccccttgagaagaggcagtctgaggctaatcggatcagagagaagtaccctgacagaattccagtgattgttgagaaggctgagaggagtgacattcctgacatcgacaagaaaaagtacctcgtccctgctgatcttacggttggacaattcgtgtatgttgttaggaagagaatcaagctcagtgctgagaaagctatcttcatctttgtgaag

SEQ ID NO: 4961 - DNA, 212 bp, Zea mays
  misc_feature: Incyte ID No: 700456081H1
  unsure 45, 171: a, t, c, g, or other
tacgggtgtctgattcatgtgaccttaactttgtccagcttcatngtgatgaatctcgtgcattggttcatactctttcaaagaataatcgtatcatttatgtactaaatgctgatgacgatggaaaactaatcaacattcctgatattgaatacgaacttgattggtacntagtggacagtgcaaagggcggaagtggaaaagggattcca

SEQ ID NO: 4962 - DNA, 268 bp, Zea mays
  misc_feature: Incyte ID No: 700456084H1
  unsure 177, 180-182: a, t, c, g, or other
ctccacctatccgccgcctcccaatcatcctgcccccaaactcccaccccgcagcatccccacgccgccgcaccttcgtcgcgtcgcgtcgtcaccggcgtgaagatggtcgggccaggcctctacaccgagatcggcaagaagaccagggatctgctgtacaaggactaccagacnccnnnacaagttcaccctcactacctacacctccaatggcgtcgctgtaatgcttctagcacaaagaaagctgactgatcttggcgagatc

SEQ ID NO: 4963 - DNA, 269 bp, Zea mays
  misc_feature: Incyte ID No: 700456086H1
  unsure 15: a, t, c, g, or other
ggaaggcgaggagangggaaccccggcccagggagagttgtggggaggggatcggcggcggaggagatggaggagcgggagaagctcgtgtgcctggccaagcttgccgagcaggcggagcggtacgacgatatggtggaattcatgaagaatcttgctaggatggacgtggatatgagtgctgaagaaaggcatttgttctcagttggtttcaagaacactattggagcaaagagggcatcatggagaatcatttgttcacatgagca

SEQ ID NO: 4964 - DNA, 268 bp, Zea mays
  misc_feature: Incyte ID No: 700456087H1
  unsure 249, 263: a, t, c, g, or other
gagcagatcctccacgaccggaacggcggtgctgtgctttcttgtggtggtctccctcttcctggccccgtcgttgttcgttgccggaactgaagcagcagcggcctacggtgcaggtgcaggtgcaggcaggaagatgaagcaggcagctgcgggagtgtggcgacgaagcaggatggctacggctaccctgcaaccagttcaccagcgggatacccggcggtgccttgttgccctcatccacctganggcggtcggggttnagaga

SEQ ID NO: 4965 - DNA, 269 bp, Zea mays
  misc_feature: Incyte ID No: 700456088H1
  unsure 132: a, t, c, g, or other
tgcatgatgtcagtgttgcaaagatcaacccacaggcacccttagataaagtctgcctgctccggttgtggtgttcctactggtcttggagcggtgtggaatactgcaaaggttgaatctggctcagttgtngctgtttttggccttggaacagttggacttgcagttgctgagggagcaaaagctgctggtgcttctcgagttattggcattgacatcgacaataaaaagtttgatgttgcaagaactttggagttacagaattgttt

SEQ ID NO: 4966 - DNA, 269 bp, Zea mays
  misc_feature: Incyte ID No: 700456091H1
  unsure 37: a, t, c, g, or other
aaactcgagacctcgcccgcccaaatacgaaagcctnagatctcagtgaccagcgccgccgcttcgttcgtgtcgaggggagaagaggaaatggcggcgagcgagggcgtgctcctggggatgggcaaccccctcctcgacatctccgccgttgtcgatgacgccttcctagcaaagtatgacatcaagctgaacaatgccattctcgctgaggagaagcacttgcctatgtatgatgagttggctagcaacagcaatgttgaatatat

SEQ ID NO: 4967 - DNA, 266 bp, Zea mays
  misc_feature: Incyte ID No: 700456092H1
  unsure 12, 22, 44-45, 120, 165, 213, 215, 244, 246, 254: a, t, c, g, or other
tcaaatttcggnttccctcgcntcccgcccacatcctccgtagnngccgcagccgccgagccgagctccaagcggaggagaataggagagaccaccgatccgccgtcggagatgagggangaggcgctggagcggctgcgcggggtggtacgggacagcgccggnaagcacctctacacgtcggccatcttcctcgccgacaaggtggccgcngnccacgggggacctggcgacgtctacatgntngcgcaggnactcttcctcgg

SEQ ID NO: 4968 - DNA, 269 bp, Zea mays
  misc_feature: Incyte ID No: 700456094H1
gaaacaatcaaccagcaacactcttctcgtataacataatacagcgaaggtaactcacatggcaacttccatgggttgtctcgtcttgctctgccttgtttcttctctccttcccagtgccgtccttggccacccatggggtggcttgttcccacagttctatgaccattcgtgccccaaggcgaaggagattgtgcagtccattgtggcacaggctgtggccaaggagaccaggatggcggcatctttggtcagactgcattccatga

SEQ ID NO: 4969 - DNA, 211 bp, Zea mays
  misc_feature: Incyte ID No: 700456095H1
  unsure 130-131: a, t, c, g, or other
agcaggggcggggtacggtgctcaccacggcgtcgttggcgccggggccgggcagcagcacggctaccaccagaaagatgcgtacgggaccgggtacggcgctgtcgcggtcgttggcaaagagaagaanngataccagtaccaggaggcgtacggtggaactgacgcgggagggtatggtggcgctcactacgcggtggtggcgccgtgc

SEQ ID NO: 4970 - DNA, 271 bp, Zea mays
  misc_feature: Incyte ID No: 700456096H1
  unsure 28, 173, 234: a, t, c, g, or other
cccgacgcatataaaactagtgcgcgangctgtctctacagccagagataaagagcgtagaaggcgaaagggtgtgcctattcttgtgcctggcttatgtcttcctaaagcactgcagccttttcttcctatatatcagcagggtttaattagtgggtcggccgagacaaaanaacaggcagctgaaggtctaggagagttaattgacgtaacaagtgagaagactcttaaggnagttgtagtgccaattacaggacctcttattcgcatc

SEQ ID NO: 4971 - DNA, 273 bp, Zea mays
  misc_feature: Incyte ID No: 700456101H1
gtgaatgcagatatagatggtggtgacccatcagctgactgttcttgcttgattcgaactgccatcagatgcgttaaggaaacggttcacgttgatctatctagttgcacccactggaaccggtttgtcgaggtacattacaatagaataggcaaagatggactgttcagtcataaagaaattactgttctgtttgtgccaaacttgttggaatgcttgccttcagtggatatatggaagaataactggattctgtacaaaaaatcaaaggca

SEQ ID NO: 4972 - DNA, 269 bp, Zea mays
  misc_feature: Incyte ID No: 700456102H1
ctagcagctcggcgctccctcttctgactccttcgaggtactcccatcgctatcgaccgggtcctcgagcgcgggagatggcggatcaggagaccccagttgcagttgaggcccctaccccggtccttggggagccgatggacttgatgactgctctgcagcttgtcatgaagaagtcgggtgctcatgatggccttgttaagggtcttcgtgaggctgccaaagcaattgagaagcatgctgctcagctttgcgtgcttgcggaggac

SEQ ID NO: 4973 - DNA, 267 bp, Zea mays
  misc_feature: Incyte ID No: 700456103H1
aggaactcaagatgctgaccatctcattgaggagacagggcatatttgaatctggaccgtaagtgcctacaggacaatgatggggaaaaaagacatctctgtggaatggttggcatggtatcatagacaaaagactagagaagatagaatttgggccaagccttgaaaagagtatgggtcgaattcagctggtgaaggatggcgaatttccagacctgtaggatgatctaattactccctactcacagagttggagtattaagtcac

SEQ ID NO: 4974 - DNA, 160 bp, Zea mays
  misc_feature: Incyte ID No: 700456104H1
  unsure 29, 32, 57, 73, 84, 132, 145, 149, 159: a, t, c, g, or other
aaatgatatctggaaaaccattgtatgtngcntttgcacagcgcaaagaagataganaagcgatgttgcaggnacagttttctncagatgcgccctgctgtaccaatgacacccactctagccccacgcctnccaatgtactctncganggctcctcanc

SEQ ID NO: 4975 - DNA, 267 bp, Zea mays
  misc_feature: Incyte ID No: 700456105H1
  unsure 40: a, t, c, g, or other
ggtgatcctagatacaatgctccccctccgaaccagcagnactatggtcagccgccaatgggcccgcagcaaggctatcctcaacagccagatccctatgctaggcctccatacagtggacctggtcatggcctcccaggggtgctccggctgcagatggctcttaccaggcgccagctgcatcttatgggccgccttctcagcacccttctgcttatgggcaaacgtacagtgcagcaactggatctgatggatatgctcaacagg

SEQ ID NO: 4976 - DNA, 267 bp, Zea mays
  misc_feature: Incyte ID No: 700456107H1
  unsure 79: a, t, c, g, or other
aatttaatagcatgctaaggtaacgaagcatatgtacctccattgtcatgctgaaattttccacattgatattattttnctctttggagttattgaatagataacaagttaagtactttagtagttcagtttctttcagctgacacctttttaatatgttatactatcaataaagagatgcataatagattggctgataggacttctgtttccctgtttgtacttttcctctgtaccttctgttttccagggagtaacattctattt

SEQ ID NO: 4977 - DNA, 268 bp, Zea mays
  misc_feature: Incyte ID No: 700456108H1
  unsure 42, 185, 223: a, t, c, g, or other
gccttaatggcgacgcatggttttagtttcgctacaacgttnactggacttcatttcgcgatgacgaccttgatgacattagtaatgaaatggctgggatatattcagccgtcctatctaccgttacctgaactagtaaaattcgccttttttgcgaacctgtctattgttgggatgaatgtaancctgatgtggaactcccttggattctatccagatgcgnaaagctgtgtatcattccagtcttatgcattctggaaatcagttc

SEQ ID NO: 4978 - DNA, 233 bp, Zea mays
  misc_feature: Incyte ID No: 700456110H1
  unsure 25, 27, 30, 35-36, 48, 75, 96, 138, 149, 154, 168: a, t, c, g, or other
gggcgagcagtcgagtgttccctancntcnccganncctccgccgccncctgcaaccgcttcacgtgccctgatncatcgcaggttcccctttctnaccccaaatggagccgaagaagtcctctgctcagcaccaagncccaaggcatnggaanccaagaagtcttcntcaacgcggcgccggggccgtcgccgccaccgccactgaagccgagtccccgttgagcagttgtt

SEQ ID NO: 4979 - DNA, 264 bp, Zea mays
  misc_feature: Incyte ID No: 700456111H1
  unsure 69, 190, 213, 216, 220, 222-223, 229, 236: a, t, c, g, or other
gcagagttgttgggacattcggttatatggcgccagagtatgcatcacatggtagtgtgtcgcctaagnttgacatctttagcttcggcgtcttgatccttgagatcgtgaccaggagaagcaactgcagctctgatgaccacagcactgtgaatctcctaagtgatgtctgggatcactggaagaaagngacgatgccacaaatgtttcacnggncacngnntgattngctcgangccaagcgctgcgatgcatccacattgg

SEQ ID NO: 4980 - DNA, 262 bp, Zea mays
  misc_feature: Incyte ID No: 700456113H1
gggtggcccgggacagagctagcaccgccacccttgagcagatctctgctggtggcaagggcttggtggtgccgtggtgtgaccaactgaaggtcctgtgccacccctccgtcggtggcttcctgagccattgtgggtggaactcgaccctggaggccgtgttcgctggagtgccgatgcttgcctttcccgttgcttgggatcagctggtgattggccatctcgtggctgatgagtggaagatcggcgtcgacttgaggga

SEQ ID NO: 4981 - DNA, 263 bp, Zea mays
  misc_feature: Incyte ID No: 700456114H1
  unsure 90: a, t, c, g, or other
cctcactggtgacttcgtttgccttcctttcctgtggatatctcctgagttcatatcaagaggtgaggtctgttgtgctgaataccctanacagggcaaggtttaccgtcgcagtggattccttcattaaaactggtcacattccctccttgaaggaaggaaactcacaggagacgatatttaatccaccttggcggcatgagccagtcgcaataggttcaaggtttggagaagcattcaagagccagcttcattctgccata

SEQ ID NO: 4982 - DNA, 266 bp, Zea mays
  misc_feature: Incyte ID No: 700456115H1
  unsure 42: a, t, c, g, or other
gcagcttatgctaaggaagtcgaagaacacataacttatggnagttcaggaagggttgcaggcttcattgcagaaacattccaaggtgtgggaggtgctgttgaactagctcctggatacctaaagttagcttatgacattgtgcgcaaggctggtggcgtttgtattgctgatgaagtccagagtggttttggccgtactggcagtcattactggggattccagacacaaggtgtcattcctgacatagtcaccatggcaaaggg

SEQ ID NO: 4983 - DNA, 230 bp, Zea mays
  misc_feature: Incyte ID No: 700456119H1
  unsure 7, 27, 30, 37, 41: a, t, c, g, or other
gggcgancagtcgagtgttccctaaantcnccgagcnctcngccgccacctgcaaccgcttcacgtgccctgatcactcgcaggtccccttctgaccccaaatggagccgaagaagtcctctgctcagcaccagccccacgccatggaacccaagaagtcctctccacgcggcgccggggccgtcgccgccaccgccactgaagccgagtccccgttgagcagcttgttc

SEQ ID NO: 4984 - DNA, 246 bp, Zea mays
  misc_feature: Incyte ID No: 700456124H1
  unsure 26, 170: a, t, c, g, or other
gccagatgggaatgaagtgccaccancctgagaagaaagaatgcgagtacaggaatgggaactgggtttctgacaatcgtagaccactatactcagggtttggttgtaagcaatggctttcagagagttggtcctgcagactaacccagcgaaaagatttcgcgtatganaaattcagatggcagcctgaagcttgtgagatgccagagtttgaggcctcccacttcttgagaagaatgcaggata

SEQ ID NO: 4985 - DNA, 265 bp, Zea mays
  misc_feature: Incyte ID No: 700456127H1
  unsure 19, 121, 141, 207: a, t, c, g, or other
cctcactggtgacttcgtntgccttcctttcctgtggatatctcctgagttcatatccaagaggtgaggtctgttgtgctgaataccctaaacagggcaaggtttaccgtcgcagtgtcantccttcattaaaactggtcncattccctccttgaaggaaggaaactcacaggagacgatatttaatccaccttggcggcatgagcnagtcgcaataggttcaaggtttggagaagcatttcaagagccagcttcattcttgcca

SEQ ID NO: 4986 - DNA, 263 bp, Zea mays
  misc_feature: Incyte ID No: 700456129H1
  unsure 2: a, t, c, g, or other
cnagattcaaaaccttttatgtgtgtcactgcctgattctgttcccattagagctctctcttgggcaccatatataagtgaagaaagcacaaatacctttgtcactgctggagaggatggtctaaagttctgggatttaagagatccataccatcctctttgggagctaactactgctccaagggctgtattaagtcttcattggctaaaagatggaagggggatcattatctcactggaagatggtacattgaagtttctaa

SEQ ID NO: 4987 - DNA, 264 bp, Zea mays
  misc_feature: Incyte ID No: 700456131H1
  unsure 51: a, t, c, g, or other
ggacaaaggagcggcggcgaggtctatggcgtcgacggcggggtacctggngcggcgggcggcgcagaaggagcgggtgcgcctgctctaccgcagggcgctcaaggacacgctcaactgggccgtccaccgccacctcttctaccaggacgcgtcggatctccgggacaagttcgaggccaaccgacacgtggataacctggacgtggtcgataggctcatcgacgatgcggaggctcagtacaggaattccagcaccccgat

SEQ ID NO: 4988 - DNA, 266 bp, Zea mays
  misc_feature: Incyte ID No: 700456133H1
  unsure 50, 182-183, 188: a, t, c, g, or other
ccagactgcagtcaagggtgctgatgtgaatgcctgggcggccgtaagtngtgctaccacccttattggcactccggtgtatcaggactatgtagtgagcacatcgggtttaggggccatggatttatgggtagctctccatcccaatcccgactcgaagccacaaatatatgatgctatcnntgatnggatggaggtgttcaagctacagcttaccaatggcagccttgcagggctgaatcctgtcccaagtgttgccctggtgc

SEQ ID NO: 4989 - DNA, 264 bp, Zea mays
  misc_feature: Incyte ID No: 700456134H1
  unsure 41: a, t, c, g, or other
tccgctgagatggacagtagcagcctcaaatccgcgcagtncctggagctgatgcgccagaacctggccaccgatgccggcaaggaggtcaccaagaaggtcggcctcgtctaccagctcaactcgcccccaagaagatcggcgttgatgaggagatcttcgtggtcgacctcaagaagggcgaggtcaccaaagggccgtaccagggaaagccggatgccactttctccttcacggacaacgatttccttggaatcgccaccg

SEQ ID NO: 4990 - DNA, 265 bp, Zea mays
  misc_feature: Incyte ID No: 700456136H1
  unsure 170, 178: a, t, c, g, or other
cacacttcctcgcgctcgcgctctcgagtcccgactcacctgcttctagccatggaggcgcctccatcttctcccttcctagtgttgctcctgctgttcttcccttcgagcggccttgccgcccccatggattttaaccatgaagtgcaagtccttatggtgatcaaganccctcctnaaggacccctatggcgcgctgagaaactgggacaggaactccgtcgatccctgtacctggtccttcatctcctgctcgccggagaat

SEQ ID NO: 4991 - DNA, 263 bp, Zea mays
  misc_feature: Incyte ID No: 700456138H1
  unsure 2, 66: a, t, c, g, or other
tnagatgttaagagggagttcaatatgagactcacagatattgttacacaattcaagatgcaaggngtgaatactgctttgtactacaagaacaaggagatggaagatacctttaacatagtgctacgagtgctgtaagtggtgaaggtattcctgatttgcttctgttactggttcaatggactcagaagacaatggaagaaaaactcacttttgttgatgaagtccagtgtactgtactggaagtcaaggttgttgaaggc

SEQ ID NO: 4992 - DNA, 263 bp, Zea mays
  misc_feature: Incyte ID No: 700456139H1
  unsure 2, 23, 262: a, t, c, g, or other
cnagcagatcctccacgaccggnacggcggtgctgtgctttcttgtggtggtctccctcttcctggccccgttcgttgttcgttgccggaactgaagcagcagcggcctacggtgcaggtgcaggtgcaggcaggaagatgaagcaggcagctgcgggagctgtggcgacgaagcaggatggctacggctaccctgcaaccagttcaccagcgggatacccggcggtgccttgttgccctcatccacctgagggcggtcggng

SEQ ID NO: 4993 - DNA, 128 bp, Zea mays
  misc_feature: Incyte ID No: 700456140H1
  unsure 2: a, t, c, g, or other
cngtaacaatgcttattgaatccagctagttgcttatttgtggatcctctctctttgttgttggccacctttatctcgtgatgtttgtgtgcatgtgaatactctgaatgtgcatttcgaagtttgag

SEQ ID NO: 4994 - DNA, 261 bp, Zea mays
  misc_feature: Incyte ID No: 700456142H1
  unsure 3, 19, 40, 72: a, t, c, g, or other
tcnggttctagatcgcgancggccaccctttttggcctgnagacattttagaatttcctaacagagtttacngttgtttagaaatttgcaagggcttcttttccgcaaatgccaccagcagattataattttgtcagcaatgctattatctctaattagtgccaccagactagacctgtatcattcatggctataaattttactcttgcaacataactaccatctctctcttaaaacgagatcaggttagcaaatgatgta

SEQ ID NO: 4995 - DNA, 261 bp, Zea mays
  misc_feature: Incyte ID No: 700456144H1
  unsure 2, 57-96, 150: a, t, c, g, or other
cnacgttcgatgcagccagatggaacagcggaggatcgattcttggcgagtggagcnnnnnnnnnnnnnnnnnnnnnnnnnnnnnnnnnnnnnnnngttgtgtatgatctgatcgatcggcgaggtcgtagctgcgagatatgcgatggngctagtagctgatcatggtggaaagtggggtttgtaagcgcaataagcggagatgcggtgtaatttaattaggtaggttttggtttgagttttgatagtatctttattttt

SEQ ID NO: 4996 - DNA, 263 bp, Zea mays
  misc_feature: Incyte ID No: 700456148H1
  unsure 54: a, t, c, g, or other
tttgttgacgatgatgagaagtgcgctaacatttcgaatggcaagaagcgaganatagggttcacgttttcgttcccagtgaagcagcgttctgtagcttccggtacgcttgtcaagtggacaaaggcattttccattaatgatgctgtaggcgaagatgtggtggctgaactgcaaacagccatggagaagcaaggtctggacatgcatgtagctgcattgattaatgatgctgttgggacgctggcgggagcaaggtacta

SEQ ID NO: 4997 - DNA, 261 bp, Zea mays
  misc_feature: Incyte ID No: 700456149H1
  unsure 12, 16, 21, 23, 25, 30, 32-33, 36-39, 83, 94, 106, 184, 187: a, t, c, g, or other
ctcctaaaattncccntttcnananaacanannaannnnaaaaatggctaacgggagtgtggcatcacgtttacgagagcggntgccatctganccacctcttagntgggaaccaagaagacggattgcactgggatctgcaagaggactttcttacttgcatgatcactgcgatcccaaaatnatncatcgggatgtcaaagctgcaaatattcttttggatgaggacttcgaggcagttgtgggtgatttcgggctgcc

SEQ ID NO: 4998 - DNA, 261 bp, Zea mays
  misc_feature: Incyte ID No: 700456150H1
  unsure 220: a, t, c, g, or other
ctgagctcaggaaatcccctctggtctccccgtcccccattccacccgccgccgccgacgcgccgcgcctgttcaagatgaatgtggagaagctcaagaagatggcgggtgctgtgcgcatggaggaaagggcagcatgcgcaggaagaagaaggcagtccacaagaccgcaaccaccgatgacaagcggcttcagagcacgttgaaaagaattggagtncaacactattcctggtattgaggaggtcaacatcttcaagg

SEQ ID NO: 4999 - DNA, 261 bp, Zea mays
  misc_feature: Incyte ID No: 700456152H1
  unsure 34: a, t, c, g, or other
ctcgatttatgaatcacagtgagccagcccaacnggtgagaccctcaagtggacagtgaatggggacactcgtgtgggcctgtttgccgtctgtgacattcctgcagggacggagctgacttttaactacaacctcgattgtctgggcaatgaaaaaacggtctgccggtgtggagcctccaattgtagtggattcctcggggatagaccaaagacctcgacgaccctttcatcagaggaaaagggcaaaaagaccaaaaa

SEQ ID NO: 5000 - DNA, 262 bp, Zea mays
  misc_feature: Incyte ID No: 700456153H1
  unsure 12, 14, 50, 82, 85-115, 161: a, t, c, g, or other
tcgcctcgttcncntcgcctccgccccgccccgccccgagcagagcgcanccctatccggagctgggatggcggacgcgaanagnnnnnnnnnnnnnnnnnnnnnnnnnnnnnnngcggcagcggcagccaccggcgtgtggaagacggtcaagcccttcnttaacggcggggcctctgggatgctccgcgacctgcgtcatccagcctatcgacatggtcaaggtgaggatccagttgggtgagggctctgctggtcaggt

SEQ ID NO: 5001 - DNA, 259 bp, Zea mays
  misc_feature: Incyte ID No: 700456156H1
cattttggatcaagcccttttgaggcctggccgcatagacaggaagattgagtttccaaatcctaacgaggactcacgtttcgatattctgaagatccattcaaggaaaatgaacttgatgcgtggtatcgatctgaaaaagatcgcagaaaagatgaatggggcctcaggagctgagctcaaggccgtctgtacagaggctggaatgtttgctctccgtgagagaagggtgcacgttacacaggaggacttcgagatg

SEQ ID NO: 5002 - DNA, 259 bp, Zea mays
  misc_feature: Incyte ID No: 700456157H1
  unsure 128, 139-161, 209, 221, 232, 239: a, t, c, g, or other
caccgttgccggcaccggcaggagcaatgcgcagtggaggatggttcaggaccatccgcaccgcattcgacatcgattggcgcgacaaggccagcgtggtcatcgacggggttgtctacttcctcagnaagaactacgnnnnnnnnnnnnnnnnnnnnnnnggatctgaggagcaagactggatagcgtcgttcgaccttgacgcaaanagtggaggccgnttatcaggggncccaaanctttaccgtggtaaaaaagg

SEQ ID NO: 5003 - DNA, 258 bp, Zea mays
  misc_feature: Incyte ID No: 700456165H1
  unsure 134: a, t, c, g, or other
gatttggttccaataagatggccacaatgtgcggtcctgaatgttctggacttctggtattgatggaacacgagctgaacactatgctgctgttttttctgttctgttttgaaatttgcccggtgatgatggcnaatgtcctgaatattctgaatattttgaaatgtttgactgttgtattatcatcttatccttccgttgtactaccgcatgagcacaatttaggattttacttgtttatcacttccgcaaaaaaaa

SEQ ID NO: 5004 - DNA, 256 bp, Zea mays
  misc_feature: Incyte ID No: 700456167H1
  unsure 134, 138, 147, 156, 158, 184, 198, 202, 206, 222, 229, 233, 235, 249,255: a, t, c, g, or other
tgcgtcgctgctctgggctacgacaatggcttgcacgcaccgggaaggtgttccgggtgccccgccggaggaactccaccacggagccgtaccttgtcgcacaccatctcatcctttctcatgcagctgctgtnaggngataccgcnacaagtatnancttcaccagaaggggaagattggaantattatagattttntgtngtangaacctttatctacancaatgcngacnangctgcagcacagcnagccang

SEQ ID NO: 5005 - DNA, 257 bp, Zea mays
  misc_feature: Incyte ID No: 700456169H1
  unsure 16, 60-87: a, t, c, g, or other
ttcgctcacctctgcnccgcctccccccatctccccacagatctcgtcgcgatgggcctnnnnnnnnnnnnnnnnnnnnnnnnnnnnctcctcctcctcgccgtatccggggtcctcctcagtcctgcggcggcggagatcaagcaggagtccttcaaggacgactcccgcggctccatcctcttcgagaagttcggcttcggcctccacggcatggtgtctatctccgtcaccggcgccaagtatcctccaagctc

SEQ ID NO: 5006 - DNA, 257 bp, Zea mays
  misc_feature: Incyte ID No: 700456172H1
  unsure 13: a, t, c, g, or other
ccaaaagcgagangcccgccgccggaacgagccagcaaagccaagcaagcatattgacggaggaggcggaacggcggaagcgtgaatccggaggctctgcagcggttctccagaagcagccgactgggcgtccgtccgcggaccggtcggtgtataaatggttggcgaggagagcggctgcggcgtcgagggagggacaggaggaggagaagcgccggtggcctctgctcccaacggggaccgctcagggaatagcc

SEQ ID NO: 5007 - DNA, 86 bp, Zea mays
  misc_feature: Incyte ID No: 700456175H1
cctcctcctccctccctcctttccatcccgtttcttcgccgcctccatctccagggccgcgtcgaattcttccatccaccgcaccg

SEQ ID NO: 5008 - DNA, 253 bp, Zea mays
  misc_feature: Incyte ID No: 700456176H1
  unsure 115: a, t, c, g, or other
tcgcgtccattaggtccatagcatctggaggggacccgtctggcgtctggcgtctggcgtctggcgtctgtctgggaccgggctgcccagccgctcgatcgacgttcggcgaggncgctgctccggtactccggttggttggaccggagggcggaggcgcggcgatgggggcgctgtcgcggccggaggaggtgctggcgctggtgaaattgcgggtggcagcggggcagatcaagcgtcagatcccgcccga

SEQ ID NO: 5009 - DNA, 254 bp, Zea mays
  misc_feature: Incyte ID No: 700456178H1
  unsure 79: a, t, c, g, or other
ctagcagctcggcgctccctcttctgactccttcgaggtactcccatcgctatcgaccgggtcctcgagcgcgggagancgcggatcaggagaccccagttgcagttgaggcccctaccccggtccttggggagccgatggacttgatgactgctctgcagcttgtcatgaagaagtcgggtgctcatgatggccttgttaagggtctcgtgaggctgccaaagcaattgagaagcatgctgctcagctttgcg

SEQ ID NO: 5010 - DNA, 256 bp, Zea mays
  misc_feature: Incyte ID No: 700456182H1
  unsure 76: a, t, c, g, or other
cctgcacagaacaaaggccacgctgatcggcttgctggaggccggcagggccaacgagtgggtggtgacggcgaantcggcagcgccatgaagatgaaatcggctaacaaagcggggctcaggaagcagttcatgaggatatgggagaggctgcacgtcacggagctcggggtggcagccttcctcttctcctgcggctggtacgatcttgcgtacgggagggaccatttcttcatctacctcttcttccagtctg

SEQ ID NO: 5011 - DNA, 254 bp, Zea mays
  misc_feature: Incyte ID No: 700456186H1
ttaaaactgaagctcaaagctgtctacatgtatgctgctggattttacacatattcaattttcgctctcctgttctgggaaacaagacgttcggactttggagtatcaatgtcccaccatatagcaactgttgttctgattattctttcctacattttccgattcgctcgtgttggcactgttgttttagcccttcatgatgcaagtgatatattcctagagattgggaagatggccaagtacagtagctgcga

SEQ ID NO: 5012 - DNA, 178 bp, Zea mays
  misc_feature: Incyte ID No: 700456203H1
  unsure 43, 77, 101, 141, 145, 148, 169: a, t, c, g, or other
ctggtgcaaatcaagacttttgtgaacttggtacctacactcnttgtgatgccggtgattcagttgtcatgtttgcncctattattcaatgcctacatgtnattccgctgacaggtgttactgacatattagttggtggtncganccnaagacacttcaacctgatgtngattggttg

SEQ ID NO: 5013 - DNA, 176 bp, Zea mays
  misc_feature: Incyte ID No: 700456204H1
  unsure 7, 26, 28, 32, 48, 63, 73-74, 132, 134, 136, 138, 162: a, t, c, g, or other
tctggangatccccagagtaccttgntnctgnagttgcatacaagctncaaacacagcctacntggtgcaacnntgcagctgagacggtggactgttgatcgctgtcatattcaaacgctgaaatgcctttngntnanctgattctcggtctatggagctgncttctgaatttttc

SEQ ID NO: 5014 - DNA, 168 bp, Zea mays
  misc_feature: Incyte ID No: 700456205H1
  unsure 36, 38, 50, 55, 68, 88, 108, 111-113, 117: a, t, c, g, or other
gaaactgcacggttgggtatgagttggattaaatcntnacctttctgttnctctngactcatgtggcngcagcaacaatgggtgtccntgtgttatagcatatgaacncgnnngcgnggcattcaggaaaatggtgatacctggtatttaacctttattttggtaaaa

SEQ ID NO: 5015 - DNA, 199 bp, Zea mays
  misc_feature: Incyte ID No: 700456206H1
  unsure 26, 28, 45, 87, 94, 101, 109, 188, 190, 194: a, t, c, g, or other
gcgcctgttgatccatacgattcagntntgactcaaagacctacncaggaggtttacaatcgggacaaactatgggacattaagtgngtgcagngtatagngggaaggnggtgaccactttttgtgcctacccgaacaaggtatactacctacaagatggaacaccacgatgaacctattaactgtgntnctgnaacgt

SEQ ID NO: 5016 - DNA, 178 bp, Zea mays
  misc_feature: Incyte ID No: 700456207H1
  unsure 4, 7, 165: a, t, c, g, or other
cggnatngtatccaatagtctccaggccatccgcaaacacaagtttgtggacatattagacgatcctggctccgctgatttgatgcctacgttgattttgcttcgatcaagcgctccgccgaggaagcttacagacgatatctcggtccatgggccaatgacgcncccagttcctggg

SEQ ID NO: 5017 - DNA, 185 bp, Zea mays
  misc_feature: Incyte ID No: 700456208H1
  unsure 17, 22, 58, 68: a, t, c, g, or other
cttaggagagaaggacnccacngggttaacacagtgaaaagccagagtgtcggatatnagcgatatgntcccccagggactaccattaccagtactgtgtgtttgatatcagaggagaggaatgaatgtgtcattgaccacggaggtataaggcaggagcctaacctggacatccctgctacagc

SEQ ID NO: 5018 - DNA, 186 bp, Zea mays
  misc_feature: Incyte ID No: 700456209H1
  unsure 22, 60, 65, 70, 77, 80, 86, 106, 108, 159: a, t, c, g, or other
cgcaggtaccgttcgttctccncgtacctcctttcattactacatctagggtttaaatcnactcnagacncgctttncgncaacanttcgtgattgctattcgatngntacgtactaaaggaagcccatgggtctagtatgatttatatctaattcagngcaactgatcgtggggattcgattctc

SEQ ID NO: 5019 - DNA, 188 bp, Zea mays
  misc_feature: Incyte ID No: 700456211H1
  unsure 2, 5, 10, 31, 60, 65, 71, 126, 151, 165, 169: a, t, c, g, or other
cnggngccantcaagcttttgtgaacttggnacctacactactttgtgatgccggtgctnctgtngtacangtttgcaccatattattcaatgcctacatgtacattaccagatgcacaggtgttnctgcacatattagttggtggttctnatcccaagacactnacanacctgatgttgattggttg

SEQ ID NO: 5020 - DNA, 183 bp, Zea mays
  misc_feature: Incyte ID No: 700456212H1
  unsure 11, 14, 30, 37, 40, 72, 86, 101, 129, 152, 158, 160, 162, 173, 177: a, t, c, g, or other
ttcaaggtgtnctncatcttacaacgccgnacgcgcngtnacacgtcgctggcggtggtggtggtaccaganaacgctggtaccgngggagaccaaggcgnagggcgggtggtggagatcatcaacaanctcatgtggctggcgtcggtgtncacgangncncgttcatctcntacntcctac

SEQ ID NO: 5021 - DNA, 185 bp, Zea mays
  misc_feature: Incyte ID No: 700456213H1
  unsure 22, 25, 29, 59, 65, 67, 75, 79, 102, 138, 159, 161, 164: a, t, c, g, or other
aagcgcctttctgtctcacgcnccnactngctgctcgctgcggcctgtggacctgacgncaacangncaacgatnctgnacgagctccgcatcatggcttancttgaaggaacaaatttcttcaaccaagattcctgnccgtctacaagagtggacagngnaantatgctcggcctgtgaaaact

SEQ ID NO: 5022 - DNA, 179 bp, Zea mays
  misc_feature: Incyte ID No: 700456218H1
  unsure 7, 31, 39, 86, 107, 109, 130, 165, 168, 178: a, t, c, g, or other
gacagancagaaatctcttgaagaagcattngaagctcngaaggagatttactgagtacggcgtgcccaaaacgatggttttcttnaccagactgaacttatttgangnttgggctccaagttgatattnccagtccttgtaccagagttccgctgaacttattnggncatcctaacna

SEQ ID NO: 5023 - DNA, 181 bp, Zea mays
  misc_feature: Incyte ID No: 700456219H1
  unsure 135: a, t, c, g, or other
cttgggtgtcttacttagactgacagatacagttctttacctgaatggactgtttggactacagtttctagaggaatctaacaataggttcaagttggatgctctgcaggttcacatccaattgaggtggacatnaatcatgttgatgaatagatgagatatttgatgctataagctatag

SEQ ID NO: 5024 - DNA, 179 bp, Zea mays
  misc_feature: Incyte ID No: 700456221H1
  unsure 27, 60, 76, 84, 86, 91, 94, 96, 106, 115, 175: a, t, c, g, or other
ctttcttgaattctgtctgcagcaacntttgctgacgtacgtaccttggatgtgtcgcanttgttttgcttcaganctactaancncaggnaangnttcaacaganctggaggtnaactactgaatgcccagggctaaccacctacaccaaaagggagctgaagaagataactantggc

SEQ ID NO: 5025 - DNA, 182 bp, Zea mays
  misc_feature: Incyte ID No: 700456222H1
  unsure 39, 61, 86, 107, 140: a, t, c, g, or other
gctttcttgaattctgtctgcagcaacatttgctgacgnacgtccttggatgtgtcgacanttgttttgcttcagactactaaacnacaggaaaagattcaacaganatggaggtaaactactgaatgcccagggcatanaccacctacaccaaaagggagctgaagaagataactaatggc

SEQ ID NO: 5026 - DNA, 184 bp, Zea mays
  misc_feature: Incyte ID No: 700456223H1
  unsure 14, 33, 54, 56, 78, 147: a, t, c, g, or other
cggcgcctacccgncctcctacttccataccgnacccgagcggcaacgtgccgncntcaggatctgtaccgctgcatngctaggcgaacggattcctcctattccccgctgcgttcggggcagggcggtgaccgtgcacgaactganatggcgccgctgttccctggttgcgattacgagcact

SEQ ID NO: 5027 - DNA, 180 bp, Zea mays
  misc_feature: Incyte ID No: 700456224H1
  unsure 42, 81, 124, 128: a, t, c, g, or other
ggaggatgcattcgaaggactcttggatttatcatgttgagntgatgatggtcgaattttgtactatctgcattgaacgancttagttgataaaatgattgatctgccctgggattctgaggangagnaacatcttacacaagtccctcttacgagtctgctcatgaagcgcccatggat

SEQ ID NO: 5028 - DNA, 190 bp, Zea mays
  misc_feature: Incyte ID No: 700456225H1
  unsure 2, 9, 15, 54-55, 59, 69, 82, 97, 106, 118, 134, 142, 156, 173, 176, 183: a, t, c, g, or other
cnaagcatntggcgnatcaagcctactacctaacctacacgacccctgtacatnngganacgccgtaanaacttggcatacnccacggcaattaacngccatgganggactgcctcancgactgagctggtacncggcgctntctctcccctccantaagctgccgttcctcngancgcctgntgaggta

SEQ ID NO: 5029 - DNA, 194 bp, Zea mays
  misc_feature: Incyte ID No: 700456231H1
  unsure 60, 63, 72, 75, 150, 159, 184, 186: a, t, c, g, or other
cgcctgggttccacactgacggtcaaccggagaatctactactacaggttgtaccaaaanganggcgaccanagnccgcatctacgatgatgcctattggtactaccacgtgtgccttaaccgaaacacctggtgaaggaacctggacantggcttgancatatggaacgctactgtaccgtgngnggattatc

SEQ ID NO: 5030 - DNA, 184 bp, Zea mays
  misc_feature: Incyte ID No: 700456233H1
  unsure 8, 10, 24, 30, 40, 52, 59, 62-63, 65, 69, 83, 86, 92, 110, 119, 122,127, 132, 147, 169-170: a, t, c, g, or other
gttgtgtncntccaactacttacnacctcnttacactgtncctggctttctntacagangcnntnggcngtattcccttttanatngctttncaggacgttgctgagcantggggtggnctnggganctgtnatggccactgaagcncgtgagagacccacgcaaaatnntcaaaaaagaccaa

SEQ ID NO: 5031 - DNA, 178 bp, Zea mays
  misc_feature: Incyte ID No: 700456235H1
  unsure 23, 35, 38, 43, 104, 128, 174: a, t, c, g, or other
cagaatcatcatggtttctgganctgtttggtgangtnatganggccatggagttgattacatgagacactttggctgaggtgaagacttcaatgaagctgaanctagaacctaaagttagacttgtngttcctaacagctacttgtggcgggataattggtcaaggtggagcnacat

SEQ ID NO: 5032 - DNA, 92 bp, Zea mays
  misc_feature: Incyte ID No: 700456236H1
  unsure 11, 16, 33, 43, 54, 57, 63, 65, 82, 84-85: a, t, c, g, or other
ctaaattctgntgccngtgccgtactaagaggngaaattgacnccaatggtgtngtngcggcntntttggtggcgcggttananntgggtgt

SEQ ID NO: 5033 - DNA, 168 bp, Zea mays
  misc_feature: Incyte ID No: 700456239H1
  unsure 12, 15, 36, 42, 71, 87, 90, 100, 103, 108, 121, 131, 135, 141, 145, 148,150-151, 155, 158: a, t, c, g, or other
ctccctcactcncgntccatttccccatatacccanatccanttcgcgagttctacctgatctgcggactnggctctcgtggagcanacntcgtctgganggnagtanaaggtccaggatntctcgaaggngganttcggnccanagncnntgangtngccgaggtcg

SEQ ID NO: 5034 - DNA, 107 bp, Zea mays
  misc_feature: Incyte ID No: 700456243H1
  unsure 56-58, 69-70, 82, 88, 97, 101: a, t, c, g, or other
tagtaacttagaacaacaaaccaagatattatgttcaattacgagggttaaccatnnncggaggattgnncaacccggttangcgcanatcaagcancaanggacaa

SEQ ID NO: 5035 - DNA, 185 bp, Zea mays
  misc_feature: Incyte ID No: 700456244H1
  unsure 59, 70, 87, 93, 99, 103-104, 122, 129, 152, 170: a, t, c, g, or other
cggggacaacgcgcaacaccgtcaagcgccggctgcagctacgcgttacaaacatgacncaccggcgggntcctcgctcaccttcgngatcgngtcctngagnncgacctctaccttcttangcccggnctcgccgctactgctcacccggnacagacatcaaccggagntgctaccaccccgtg

SEQ ID NO: 5036 - DNA, 211 bp, Zea mays
  misc_feature: Incyte ID No: 700456246H1
  unsure 7, 61, 65, 80, 93, 132, 158, 181, 183, 189, 199, 207, 210: a, t, c, g, or other
ctgcaanaaaggagagtgtgatcaccaacagtagtgctagtacccccttaccttcccaacncatncctggcatgcgtgancccttaccagagntgacccccattgaccagatgaggcaaaggatgcaaacanccaggtacccagggggccagccagcngttaagacgtagggacgacaggngngtacanccatccaacncagacctntanc

SEQ ID NO: 5037 - DNA, 186 bp, Zea mays
  misc_feature: Incyte ID No: 700456249H1
  unsure 54, 70, 114, 119, 152: a, t, c, g, or other
cacgggcggcctcgttgacaacttgacagagaacccagtcctactcgctttacncaccgcgattcgcctngcttaccataccgattgattacgggagctagaggagagagaggngaggngaggcgtgatgcgctggctgagtcgcccccgtngcaccgcaaggcaacagatttacttctccacgta

SEQ ID NO: 5038 - DNA, 168 bp, Zea mays
  misc_feature: Incyte ID No: 700456250H1
  unsure 66-67, 87, 102, 115, 118, 124, 151: a, t, c, g, or other
gtagtcatcaaagaaagccttactacataccgcaggcatattgtcgtattgtctttctacgtaatnnctttgtacgatgttgacccntaggtgttgttggtncttggtaattcgncangctganttgggaccttgaacgattcgagatctnatgcgtatgcactgaac

SEQ ID NO: 5039 - DNA, 169 bp, Zea mays
  misc_feature: Incyte ID No: 700456251H1
  unsure 12, 27, 30-31, 33, 45, 53, 55, 61, 70, 78, 81, 87, 93, 101, 113, 121,132, 137, 144: a, t, c, g, or other
gcctaacaagancgtacatcggacgcncgnngnagcttgaacagntcatttcntncatcgngccaaaggnggctgcgntgncgtggngacagnacttgcanccgagtctacgntcgagatnaatacgagatnttcgncatctcnatggcatctcgacctatcgattcct

SEQ ID NO: 5040 - DNA, 197 bp, Zea mays
  misc_feature: Incyte ID No: 700456255H1
  unsure 2, 4, 16, 18, 62, 101, 127, 131, 168: a, t, c, g, or other
cncncacctacccaananccctcgattccttacccagactactggctaacttacctaacgcncaccaccgacccgctaccggcctacggtacctcgagcangctgaccatggctgccgccgcgctgngggngcaactacaacgctactacctactacctaccatgttncgcctacgggtactggtggacgagacagt

SEQ ID NO: 5041 - DNA, 181 bp, Zea mays
  misc_feature: Incyte ID No: 700456256H1
  unsure 7, 13, 27, 29, 33, 50-52, 55, 65, 75, 89, 102, 104, 114, 117, 130, 143,170: a, t, c, g, or other
cagccgngttcgngtcgccatggggcngntcgngtgggcctgtgggccannngcnaacaggcgcnggcgtaccgncctgatcctacatnaccgggggaatcntngccacagctnggngcttcacccagtngtactttggtganctactcccattgtggcgggcgtgtttntgtgcctgctg

SEQ ID NO: 5042 - DNA, 176 bp, Zea mays
  misc_feature: Incyte ID No: 700456257H1
  unsure 4, 14, 21, 32, 59-60, 69, 81, 95, 99, 106, 137, 174: a, t, c, g, or other
ctcnagcacatacnacctacnggtcaaacccnaagcagggagttgatttatccgctgannccatgagtncgttgcagtctngtctgtcaaggatnccanctcccanattgttggggatgccaaggagaagaataggnagttcactgagactgtggaacttcagattggtctganga

SEQ ID NO: 5043 - DNA, 186 bp, Zea mays
  misc_feature: Incyte ID No: 700456258H1
  unsure 52, 55, 57, 66, 72-73, 75-76, 80, 89, 94-95, 111, 114, 117, 132, 151,157, 167, 177, 182: a, t, c, g, or other
gttcctgtacggtggtcgccccgcttacatactgtactcatacttcccccancgnancaacttcangccctnnannctgnataccgacncccannatactgagtactgacntanttntttatagcgtaggcngtcagcttggcagggcganaccatngaggtagaangcggaaggtngtggngggc

SEQ ID NO: 5044 - DNA, 178 bp, Zea mays
  misc_feature: Incyte ID No: 700456259H1
  unsure 31, 35, 59, 70, 86, 114-115, 172: a, t, c, g, or other
cctgctgctagagttacatactcacccaatngaancaattctatgcccggtgattgtancctacctgaancagaagcgctactgangcagaactacgagtggtgttggatcganntggaaggcgggatgtcaagtttggacgccgcctgaaagcttcttcatacgatggcangcagca

SEQ ID NO: 5045 - DNA, 188 bp, Zea mays
  misc_feature: Incyte ID No: 700456260H1
  unsure 36, 55, 58, 60, 85, 177, 186: a, t, c, g, or other
gacacgctaggtaggggaagatatgggcgccgaggnggacgccgctgcacgccgnganantactaccgcgcacctaccgtgaccnccaaggaacctacctctaccacccccgacggcgaccccaaccccttaccaccgaacggagaacaccaaaatggcaaccatgagctggcagangagccagantt

SEQ ID NO: 5046 - DNA, 177 bp, Zea mays
  misc_feature: Incyte ID No: 700456265H1
  unsure 23, 113, 156, 165: a, t, c, g, or other
tactttgggtaaggtcgattgtngtctgcaaataacacaatcgatgggctgatttgtgctgtacctctaaccttcctatgtagcagtatttctcaggcagtatctggcgaggnctaaagcagcgagaaccaagatagtgctgaagcagaagcactnctgcttggntacccatgaata

SEQ ID NO: 5047 - DNA, 186 bp, Zea mays
  misc_feature: Incyte ID No: 700456270H1
  unsure 6, 10, 15, 17, 52, 63, 109, 121, 163: a, t, c, g, or other
caaggntctngcgangnaccccgtggatgggttctaccgaccgggacttgtngacgaacagcncacatacttacgagtggcagtcaccatcatacggaaccgacctgancaccctatatgntggaggctacttcaatgcaataatgaaccttacccccagaantatacccaacagcccgccatcag

SEQ ID NO: 5048 - DNA, 176 bp, Zea mays
  misc_feature: Incyte ID No: 700456271H1
  unsure 71, 79, 117, 160, 171: a, t, c, g, or other
tggagactctgactcatactcggaggagcgcaaccaccagctaccaccacttctacgggtcgccggaaganggcgttangcgtcgcctacagtaccacgcgcataaccatgcgggcnactgcgggcgttccactccggcatcaccgtcggcatcctgagnaccccgcccgngcaag

SEQ ID NO: 5049 - DNA, 177 bp, Zea mays
  misc_feature: Incyte ID No: 700456272H1
  unsure 5, 11, 22, 65, 82, 86, 89-90, 94, 100, 109-110, 116, 123, 148, 157, 161,173: a, t, c, g, or other
gtcantgcagnctgattttgcnacttgatgcccgtgtagatgatgttaactgtggaaaaccttancttggaggtacacctgnttgncanngccnaatgcncccatatannatcccngatgggntggaggactatgcatatccttgctnctgctacancggnagccatacctgntgtt

SEQ ID NO: 5050 - DNA, 176 bp, Zea mays
  misc_feature: Incyte ID No: 700456274H1
  unsure 2, 7, 32-33, 45-46, 54, 57, 61, 71-72, 96, 98-99, 105, 107, 130, 164,167: a, t, c, g, or other
gnttgcnatgctgaaagtggtgaattgaaggnngtttttacaganncaacatantcncccnaaaaacacanngggtagcatcatgcagcagcaggncnnccgagncngcaactgcgaagggtggtgcagntgctgaaccaatacgggcttactgatgctacganagntcgtttgga

SEQ ID NO: 5051 - DNA, 176 bp, Zea mays
  misc_feature: Incyte ID No: 700456275H1
  unsure 9, 11, 17-18, 20-21, 23, 64, 67, 96, 104-106, 120, 162: a, t, c, g, or other
gcaaacccnantccccnncnncnccgccggaaacccttacggatactgcggcgagcgccaacancgnttcagatcgaatcacccagggggagattnaagccccnnngtctgggaatttcncggggaagcaagcggttggtgatttggtggtgaaggaggctntggggtcgtcgtcg

SEQ ID NO: 5052 - DNA, 184 bp, Zea mays
  misc_feature: Incyte ID No: 700456276H1
  unsure 61, 64, 82, 140, 159, 171, 176: a, t, c, g, or other
tcactggaaagactatacaccctacgaggtggagtacttctgacacctacgacaacgtcanggnccaagataccaggaacangagggctccctccagaaccagcagaggctcatttttgccggcaagcagctacgaggangggcgacacgctggaccgnactacaacattncaganggagagac

SEQ ID NO: 5053 - DNA, 75 bp, Zea mays
  misc_feature: Incyte ID No: 700456277H1
  unsure 7, 24, 33, 52, 66, 68, 72: a, t, c, g, or other
ctgaccnttgaccatactaactgnacctgtggnacctgctcgacatttaccnccaacaaacatcantnatcntcc

SEQ ID NO: 5054 - DNA, 193 bp, Zea mays
  misc_feature: Incyte ID No: 700456278H1
  unsure 11, 16, 20, 38, 54, 58, 60, 80-81, 85, 89, 92, 98, 102, 141, 149, 158,165, 187-188: a, t, c, g, or other
aacagatccgnggaantctnttccagacctaccgaacngccctccgatttaccnactncngactaacaagttacgggagnntatntagngcncatctnctgncttatgggaacctgccagacaccgtttttgtggcatagntccttacntgaccaaancaaccangagctacccagattacgtcagnnttatt

SEQ ID NO: 5055 - DNA, 181 bp, Zea mays
  misc_feature: Incyte ID No: 700456280H1
  unsure 2, 34, 59, 80-81, 105, 152: a, t, c, g, or other
angtccaccctaccgccgaccggtacctctcctnaaacccaaccaaaccctagatccgnctgacactcagttccggtgannaccctcctttccagcgaaaatgcngaacctcgagtgccggatgtatgagcagcggttccggagtggacgcngcggtgatgatccggtgaagcacatcgcg

SEQ ID NO: 5056 - DNA, 169 bp, Zea mays
  misc_feature: Incyte ID No: 700456281H1
  unsure 16, 23, 31, 33, 40, 46, 67-68, 75, 116, 119, 125, 128-129, 148-150, 156,161-162: a, t, c, g, or other
gctaagggaactttgncaacatncgtcttgngnctaagtncttgangggtgaggttggacccaagannatccatntcctctggggatgagctttcagtttttgatgctgctatganatncaagantgnngggctgttactattatccnnnctggtnccgannacggagt

SEQ ID NO: 5057 - DNA, 176 bp, Zea mays
  misc_feature: Incyte ID No: 700456282H1
  unsure 14, 55, 61, 70, 75, 84, 88, 103, 107, 128, 145, 149, 154, 158, 160, 167,170, 172, 175: a, t, c, g, or other
cttgctatgcatgnacagtggtgaattgcaggatgtttttgaggagcacaatatnccccanaaaccacanggtancaaaaatgngaancaggtacagcccgantctncaactgagaagggtggtgcanctgctgaacccaaacgngctnaactnatgntncagaaanctngnttng

SEQ ID NO: 5058 - DNA, 174 bp, Zea mays
  misc_feature: Incyte ID No: 700456284H1
  unsure 20, 26, 30, 56, 63-64, 83, 103, 110, 138: a, t, c, g, or other
gatgaatcctaacacagggnggcaancctntggtttacaaaatgtagttgatatancaaacannctatgctgccaagctgttncctgaaacaactagaccaanatgaganccttgtatcagtcatgcagatgtctgcnattttctgggaaaaggatgttatgccgatgcttttc

SEQ ID NO: 5059 - DNA, 173 bp, Zea mays
  misc_feature: Incyte ID No: 700456286H1
  unsure 58, 115, 143: a, t, c, g, or other
ctcaggaacaggctcaagtatgctctgaacctaccgtgagtccatttactatacctgntgcaacgccatgtacttgtgatggcaaggtcaggactgacaagacctaccctgctgngttacatggatgtcatttccatccctangacaatggagaactacaggctgctttatga

SEQ ID NO: 5060 - DNA, 168 bp, Zea mays
  misc_feature: Incyte ID No: 700456290H1
  unsure 2-3, 18, 29, 32-33, 40, 47, 59, 62, 84, 102, 110, 166: a, t, c, g, or other
cnnatcggcccaaaaaantgtctttgctnttnntatacanctcaagnggtgtttttcancgncattctgcttgatatactgttnacagtgaaacttcagacnctttaccntgtgatcggaaagaacatctacctgttcacttaccaagtacctgggccatcttaanac

SEQ ID NO: 5061 - DNA, 232 bp, Zea mays
  misc_feature: Incyte ID No: 700456293H1
  unsure 10, 46-47, 69, 72-73, 95, 116, 120, 138, 143, 171, 206, 216, 231: a, t, c, g, or other
tgggaaactnggacgggaggaatgggcttaactactggacgtgganngttgcgacgttccacgccgaantgnngccacgagaggaatccattcanccccgacgcccaacggccaanaacnaggaaaaacgtgctaccngacgnagaaaggggaccgacagaataccagggnaaacttaacctaccgtacgttcccagaagaggttnccaacttacncctgagaatggcgtnc

SEQ ID NO: 5062 - DNA, 179 bp, Zea mays
  misc_feature: Incyte ID No: 700456294H1
  unsure 7, 19-20, 24, 30, 48, 65, 72, 78, 112, 167: a, t, c, g, or other
gctcatncacaccgactanngatncatgtnaaacgagactaagcttgnacagcggcattaaagtnttagacntgcttntgctacccagaaggttgttgaggttgatgctacntgctaaggcattggctggtcaaacggatgaggcttacttcgcagcaaatgctganctcaggcctcga

SEQ ID NO: 5063 - DNA, 62 bp, Zea mays
  misc_feature: Incyte ID No: 700456301H1
  unsure 32, 36, 39, 48, 53, 57, 60: a, t, c, g, or other
ctggcaggtggcagctaagcattctaattacnactnggntacccagtngagcnaggngcngt

SEQ ID NO: 5064 - DNA, 281 bp, Zea mays
  misc_feature: Incyte ID No: 700456302H1
  unsure 10, 78, 106, 136, 155, 165, 198, 203, 259, 272: a, t, c, g, or other
ggaaacaggntgggtgccaaagaaactcgatgtgtatatagatgtgccagatacaattgatatcacacatatgcgcanaaaggattacagcctggggaagagctgntacctgaaggaggttctggtgacgacagtnccgagcctgctaatcctgntgccagtganttattgtaacccagcttgcaagcatgggcttcnactancttcattgtcagaaagctgtattaacacatcaagcacaggagttgaggaacgatgnattggtctctcgncatggtgac

SEQ ID NO: 5065 - DNA, 193 bp, Zea mays
  misc_feature: Incyte ID No: 700456303H1
  unsure 85, 141, 145, 167, 175: a, t, c, g, or other
caggatgagctggacgacatgggccaaaacctatcctggccgctttaagatctactatgtgttgaatcaggtttgtgtcacattnctttagaaaatttgaaggtattactgtatcaacattctttatttcatgtataggancacnttagtttttttttgtaaaaagnacagcagngcttcactgtttcaactc

SEQ ID NO: 5066 - DNA, 279 bp, Zea mays
  misc_feature: Incyte ID No: 700456304H1
  unsure 13, 34, 74, 94, 165, 191, 198-199, 211, 224, 266: a, t, c, g, or other
cgagcctctgccngagaagccaggcgctgttccnccaccccagaagaggatggcaaaggtggctaaggactcancccaggagttaaaaagatgnccctgggccagctgcagtcagcaagaggtgtggcatgtttgggatgcaaggggacgtgttcgggcttcganccacattcatggaggaaaatatgcangtcttgnnaatgcagccaanaggaccatgcctnacatctgaactagaagacgatcggaaaattggccgcttactnatcgactccaagt

SEQ ID NO: 5067 - DNA, 278 bp, Zea mays
  misc_feature: Incyte ID No: 700456305H1
  unsure 13, 19, 30, 56, 67, 71, 94, 100, 111, 113-114, 118, 120, 132-133,153-154, 173, 184, 199, 210, 213, 223, 276: a, t, c, g, or other
ggctgtgcgaagnttaacngtgcatctgancaggagacattcaaacctggtggcangaggacccganttcngagtacgccctgcttggctcatngtgtgnaacaccataananngacncntgtccttgtgtnnctgctgcttggatctgatgnntcacgcagtccattttcanttgtctctttntgtatatcatctacncagtggcttgngcngattactganaccctcaggagtttgggcccccacattaattatgataaaaaatgtcaaaatanca

SEQ ID NO: 5068 - DNA, 111 bp, Zea mays
  misc_feature: Incyte ID No: 700456306H1
gggtcagtgatggaaaggggttaacttcagccaggattgatggcagctgagggaaattcttgcccaactaaacccagaactgcaaacttaacattagaaaataaggtccag

SEQ ID NO: 5069 - DNA, 273 bp, Zea mays
  misc_feature: Incyte ID No: 700456307H1
  unsure 36, 102, 170: a, t, c, g, or other
attcattatgtaaaattatttttacaacttatagcntttttcatttgatatagatattacatgtcattttttgtaagaagtttgacttaggacaaatcccanattcgttatcgtagtatgaatgctttgtgctactgaagacaccatgtttaatttactttgtataaggnattgattttgatatatgcagcttaaatatagttgctttgctttacctgcataatgctcaaattatatgtgtttttctattgtaaactgatttagccatgtagc

SEQ ID NO: 5070 - DNA, 269 bp, Zea mays
  misc_feature: Incyte ID No: 700456310H1
caaatccacaggcccattcatacatgtggggagctcagcccatggtaccaccttatgggactccaccaccaccttatgtgatgtatccacctggagcagtatatgcccatccctctacacctcctactatgcatccgtttagtcattaccctatgccaacaaatggacatgctgaaactcctggaaccgcgccaagtgctccagaaatgaatgggaaaagtgagcctggcagaacatctgctccatctgccaatgggattacctcgcac

SEQ ID NO: 5071 - DNA, 260 bp, Zea mays
  misc_feature: Incyte ID No: 700456314H1
  unsure 7, 28, 30, 32-33, 72, 83, 98, 103, 128, 154-155, 161, 204, 253: a, t, c, g, or other
gggaatnagaaaataactttatttcatncngnnaaagcgggccgatgtccagcctcagaacttcctggaacngcttcttggtnccggcagccttggtnacctngagcacgttgaagcgcactgtcttnctcagaggccggcactcgcccactgnnacgatntcaccgatctggacgtccctgaagcagggggacaggtgtacanacatgttcttgtggcgcttctcgaagcggttgtacttgcggatgtagtncagatag

SEQ ID NO: 5072 - DNA, 220 bp, Zea mays
  misc_feature: Incyte ID No: 700456315H1
ggcatgcgtcagaccttccagagctgccccattgccagaagagcaaagatcaacaccaggtccaggggcagcagcagtagcgtggcgaaggggtcaccaccaccagccttccagttccagtgcagggcgtcgactttcgcggcggacaccagcctccggctcgagctggacgagaaccccgaggcgatcatctcgggggcgtggccgggaactgctccct

SEQ ID NO: 5073 - DNA, 232 bp, Zea mays
  misc_feature: Incyte ID No: 700456317H1
  unsure 2, 15, 23, 26-27, 31-32, 40, 46, 50, 58, 105, 187, 198, 206, 228: a, t, c, g, or other
tnatgttgctgaatnaagagacnctnnaatnnatcatganggcgcncttnacgttgcngaaaactatgtcgactgacaacaagggtttgtattcaacaaccttcnaagttccagatgtttatggagttttccagttcaaagttgagtaccaaagactgggatatactggtctgtcttttacaaggcngattccggtangtccttanagacataatgagtatgagagancata

SEQ ID NO: 5074 - DNA, 289 bp, Zea mays
  misc_feature: Incyte ID No: 700456319H1
  unsure 9, 133, 157-158, 162, 179, 184-185, 192, 204, 211, 255, 258, 263, 266,272, 276: a, t, c, g, or other
gttttgtcnctaactgtttcagctccttcaggttccttggccacataaagttcttgcacttgattgtgaaatgtgcataacagaagccggatttgagcttacaagagtgacattaattgacattaaaggatcngtggtgctagatagactagttaannctgntaatccaattcattganttacnntaccaangtttcagtggangcactgnggagatattgggctgacgtgtcccacatccctgcatgaaattcnggnagaanttngtgggnctgnttataacaggaac

SEQ ID NO: 5075 - DNA, 275 bp, Zea mays
  misc_feature: Incyte ID No: 700456321H1
  unsure 20, 25, 38, 44, 111, 158, 185, 188: a, t, c, g, or other
gcagcacccaagcgcgtcgngtttnctacaccaccggngctcanggaggagctggtggatgctgagtatgatgtgggtgatcctctccgattccgcatcgtcgacagtgtnctgggtgctgcctctccacctggactagcaccacgcgttctggacancggcgacctgctgttcactacggcggnggngcccacgacgttcaaggaggctgagcagagcccatgttggcgaagggcgatgctcgaggagatgaagtcgatcgaggaaaacaagac

SEQ ID NO: 5076 - DNA, 271 bp, Zea mays
  misc_feature: Incyte ID No: 700456324H1
  unsure 114: a, t, c, g, or other
atctgtcggcactttctgagttcctcccagaaccagctgcaccagagcagaagactgaagcaaagctgaactgcaagtcaagacagacattagtggtgcaggagtctgctcatncttaaggctgtactggacaacccgcagttccagcttgacccattcgctgcgatccatcagcacctgctggcaacgcagccgcctgcagctgcaaagaaggacgacgcagcggggaagcaggggaaggtttccaaggacaagaaaagcaggaggaaga

SEQ ID NO: 5077 - DNA, 269 bp, Zea mays
  misc_feature: Incyte ID No: 700456325H1
  unsure 18-19, 48, 135, 153, 155, 210, 268: a, t, c, g, or other
ggagtctggagacgacgnncagaaatgggcacctcgaaaggggaaggnaaagaaggaagaacaggtcattcagcctcggacctacaggtggctgaaggagagaatgtatttggtgtctgccatatctttgcatcnttcaatgacacttttgtncntgtcactgatctttctggcaaggaaaccatctgccgtgtgactggtgggatgaangtaaaggcagaccgagatgaatcctcaccatatgctgctatgttggctgcccaggatnt

SEQ ID NO: 5078 - DNA, 186 bp, Zea mays
  misc_feature: Incyte ID No: 700456326H1
taatttgggatggtgatgacaatgacgatgatggggaccaggagaactgagccctcgcgtttaggcggggaattatgtgacccgtttgggggattttttttggttgtttgacttagctggaactcaacttagggaactgtttagtgccttatgaagtcaaccaacttgaaaggagactgctatatc

SEQ ID NO: 5079 - DNA, 270 bp, Zea mays
  misc_feature: Incyte ID No: 700456328H1
gcgagcgagagagcccggagccgagagaccagccagccatggcgctgcgtgccctgtacaacgagatccggagcatgaaggtccgcgacgtgccggcttacctgaagccgcgcttgacctgggacaacgtcaagaagagcgccgaccaggccgtcgaccgctacattcgagaagtacattcgacacgagctcgccggaccctctctaaccacgtctgcatcggagggatgatcttctcctacttcgtcaatctgccctgggagcgcgccc

SEQ ID NO: 5080 - DNA, 266 bp, Zea mays
  misc_feature: Incyte ID No: 700456329H1
  unsure 146, 206, 208, 210, 217, 222-224, 230-231, 234, 236, 242-243, 249, 253: a, t, c, g, or other
cgttcttgcagtagtccacttgcccaccacttctattgtctggtctgctaatgctaactctccagtttctcattcagacaactttgtgtttgacaaggatggcaatgcctacctgcagtctggaggttccacggtgtggactgccnatatctccggcaagggggccacctctatgcagctgctagactcgggcaatcttgtagtgntngnaaggagngctcnnntcctcnngtncncgatgnnagccancganctgcttggtggcg

SEQ ID NO: 5081 - DNA, 276 bp, Zea mays
  misc_feature: Incyte ID No: 700456330H1
  unsure 77: a, t, c, g, or other
ctcgcctcgggtcaaaccctaagcagggagttgatttatccgctgcagccatgagtaagttgcagtctgagtctgtncaaggatgccatctcccagattgttggggatgccaaggagaagaataggaagttcactgagactgtggaacttcagattggtctgaagaattatgatccacagaaggacaagcgtttcagtggctctgttaagttgccccatatccctcgttcccaagatgaaggtgtgcatgcttggtggatgcccagcatgttgagg

SEQ ID NO: 5082 - DNA, 277 bp, Zea mays
  misc_feature: Incyte ID No: 700456331H1
  unsure 232: a, t, c, g, or other
gaagtcttggattctgcagcgcattcttctttgttagctgttgatcctgtgaagtatggtaacgaaatgtccaatggtcaaatgctaccatgaagtgcaatctcagatctgtcagtcgaagtctcagctgaaaagagagctcggctgatttgattcacagaaatagtgaagtaacataacccggcatgtaggtagctctccgacaactttgggcaaagatttgaatttgtgncccaatgttgatctttctggagcattggatggagattaggttggc

SEQ ID NO: 5083 - DNA, 269 bp, Zea mays
  misc_feature: Incyte ID No: 700456333H1
  unsure 52, 194, 227, 239, 243, 249, 264-265, 268: a, t, c, g, or other
ttcgctttgaggagagtgagatcaagtgggcgtcacgctgggacacctacantgttgatgaccgatgatcagattcactggttttctattgtgaactctctcatgatcgtgcttttcctatcaggcatggttgccatgataatgcttcgcactctctacagagacatttctagatacaatcagcttgaaactcnagaggaagcacagagggaacaggctggaagctngttccatggggngtgnttcgtnctccaactaaaccgnnttng

SEQ ID NO: 5084 - DNA, 176 bp, Zea mays
  misc_feature: Incyte ID No: 700456334H1
  unsure 75, 101-102, 140, 174: a, t, c, g, or other
tagaggaggaagcaaagcagaaacatcttgcagaacaatgtagaagtacacatgcatcttctgttattggtacanctagtctttcaagcactgtgaatttnnacaggggtccggataaccatgaaagtgcactcaataantcttcacatacttgtcttgaaggcataaaggttngt

SEQ ID NO: 5085 - DNA, 287 bp, Zea mays
  misc_feature: Incyte ID No: 700456335H1
  unsure 2-3, 12, 24, 133, 143, 162, 217, 224, 280: a, t, c, g, or other
cnnaacaatgcnattctcgctgangagaagcacttgcctatgtatgacgagttggctagcaagagcaatgttgaatatattgccggaggggccaccccagagctctatcagggttgccccatggatgctttcnaactcctggngcaacaaagttacatgggntgcattggaaaggacgaatttggtgaagaaatgaagaaaaacggctcaagctgcnaggagtnactgctcatttataacgaggatggagactgctcctaactggccacatgtgctgtangtgttgt

SEQ ID NO: 5086 - DNA, 273 bp, Zea mays
  misc_feature: Incyte ID No: 700456337H1
  unsure 40-41, 104, 204, 252, 259: a, t, c, g, or other
atcccgcctccgccttaaaccctaaaccatgacctctcgnnccgccgcggaggccgccctcctccttccgctccgcctccacttctgccccgctgccgcctgcncttcttctgtacctccgcctcccggctccgatgggcgtgttccgcggcggcgctgcttgccgtcgtttcgctcgtcaccgccatctgcgctatgcccgangccggcgccggcaccaacgttgaagccgatgcggacgctttgggttgnagattgnagcgttcagctaaa

SEQ ID NO: 5087 - DNA, 270 bp, Zea mays
  misc_feature: Incyte ID No: 700456338H1
  unsure 216: a, t, c, g, or other
gtttggaacaaacaagctaaagtatcctgtacatagcatccttgttttcgatcagcacaaaaatgcaattcctgttgcgtggattataacccccaattttgcacatggtgaaatatataaatgggtgggtgctctttatgatcgagcgcatacaaaagatcctacttggcaattgggtggctcattattgatggtcccttgactgacgttcgcacnataagagaagtattccattgccctgtgctgatcagtttatggcgtatccggcat

SEQ ID NO: 5088 - DNA, 268 bp, Zea mays
  misc_feature: Incyte ID No: 700456339H1
gaagtcttggattctgcagcgcattcttctttgttagctgttgatcctgtgaagtatggtaacgaaatgtccaatggtcaaatgctaccatgaagtgcaatctcagatctgtcagtcgaagtctcagctgaaaagagagctcggctgatttgattcacagaaatagtgaagtaacataacccggcatgtaggtagctctccgacaactttgggcaagatttgatttgtgcccaatgttgatcttctggagcattggatggagattagg

SEQ ID NO: 5089 - DNA, 260 bp, Zea mays
  misc_feature: Incyte ID No: 700456343H1
  unsure 215, 252-253, 258-259: a, t, c, g, or other
ctggcctgtatgaagcttgttccgtaatcatctcagagctcccaaaataaagagtgaagattgcaagatgaagtggttgctaaagaggagtctactccagtgtcttctcatcaagaggatggagctatctaattgatgctgggtagagggatctagaacctcttcactgcaacaaaggtactagatctatgctgctgttgatggtgctaagtgtncggtgggctcggcgttctatagttaaagtagctctgnntactnnt

SEQ ID NO: 5090 - DNA, 264 bp, Zea mays
  misc_feature: Incyte ID No: 700456344H1
gggcaggtcatcaacaaagacaagtcttctgttcactaaaaatacgagaagtgagacgaagatggcggtcatgcaagctctaaatttaacacaagggactttcaacgacagatatctgggcttaccagttcgctttgggcagtccaggacaaaaacttcttagtacttaaatgataatgtgacaacgtattcaaggttggaaagaaaagctgctgtccaaaagccagtaaataagtgctgataaaggccgtagcacaaggattc

SEQ ID NO: 5091 - DNA, 267 bp, Zea mays
  misc_feature: Incyte ID No: 700456345H1
  unsure 52, 126: a, t, c, g, or other
acctaatccccttccctcccattggcagccgtcgccatgctgcgcgtccganatcggctcctccctctgctgcggcgccgcctgccccgcttccctcccccatccacatccacctccgcgtgtgcngcctcctctccacctccacctccacctctacggccaccgtccccgcacccttctcccttgagaactacctcgtcgccgcctgcggttcgcacccgcccaagctcgcttggtgtccaagaaggcgttcaacgagttgtccag

SEQ ID NO: 5092 - DNA, 267 bp, Zea mays
  misc_feature: Incyte ID No: 700456346H1
gttatttctcttcctcctccaaaccaccgatgtcgctaccggttctatccctgcgctgccattgctcgtccgcatcctccttggatttccctcccaggaaggttagggttttctgatgcgctcatacatggggcagcaagaagatgggatgtctgatggcttgtacacttacaagcatcaccgcgagcgaggagctgatatccacaccatctttgtgaagaagagcaaattcaggattctgctgtcatttatcggcacaacgttcct

SEQ ID NO: 5093 - DNA, 273 bp, Zea mays
  misc_feature: Incyte ID No: 700456347H1
  unsure 24, 32, 68, 100, 206, 222, 227, 229, 232: a, t, c, g, or other
tgctcgccaagagttcttcttgtntaggcaanggcaaaagcaggagcaaaaaggtttcgttggcgatngcgagctcgtggacgcttcctgaccacccgangctccccaaggggaagccggtggctgttcgtcgtgctggacggatggggcgaggccaaccccgaccagtacaactgcatccatgtcgctcagactcctgtcatggnctcgttaaagaatggngctcntnaanaaatggagactagtgaaggctcatggaacagctgtgggtct

SEQ ID NO: 5094 - DNA, 273 bp, Zea mays
  misc_feature: Incyte ID No: 700456348H1
  unsure 125: a, t, c, g, or other
cccagacccagcagctattgtggtcgtccctcagccgcgtcgcaccgcatcgcattctacgattcgaagctctctctgctcgcagccatggcgaagaattacccaaccgtgagcgccgagtacangaggccgtcgagaaggccaggcgcaagtccgcgccctcatcgccgagaagagctgcgcgcccctcatgctccgcctcgcgtggcactccgcggggacgttcgacgtgtcgtcgaggaccggcggtcccttcggtactatgaagtgccc

SEQ ID NO: 5095 - DNA, 266 bp, Zea mays
  misc_feature: Incyte ID No: 700456353H1
cgagagttgccggaggtctggatccctgtgataataataaactgatataagcagaggaagcggggaggaagctgcgagttggagggggccgggagaggcgtctctggttattgctgggagtggacgggccgggaaggagacgagaagataagggcgccgcgcgggccatggctggaagtgcgccggcgacggcgatggacaagaccagctttgccaccacgtgcagcctgctgagccagtatgtcaaggagaagaagggcggcctg

SEQ ID NO: 5096 - DNA, 268 bp, Zea mays
  misc_feature: Incyte ID No: 700456354H1
  unsure 63: a, t, c, g, or other
gaggctgcttgtctatgagtttgtccccaataacacattggaattccacttacatgcgaaagntcgaccaacaatggagtggcctgctagattaaagatcagtttgggtgctgccaagggtttagcttatcttcatgaagactgccatccaaagatcatccatcgtgacataaaggcatctaacattcttcttgacttccaatttgaagctaaggttgctgattttggacttgcaaagttcactactgataacaacacccatgtttcg

SEQ ID NO: 5097 - DNA, 266 bp, Zea mays
  misc_feature: Incyte ID No: 700456355H1
  unsure 9, 23, 59, 69-70, 186, 212, 239: a, t, c, g, or other
gaaaaatcngaagaagttcagangaacacctaagacaaaccaggtcggagacatcgagncacagcgtcnnatcatcttttcatgatcccaagctgaaaggcaagccctccagagagcgttatgtgacccacaaccgagcacattggtgacagaccttcggggcctgtctgaagccacagcctccanggagagccctgtggccgactctgcantctccaccctggctgggatcagagcangagcatcctctgctggttcctgactgg

SEQ ID NO: 5098 - DNA, 259 bp, Zea mays
  misc_feature: Incyte ID No: 700456357H1
gctgacggaataaaagttgtaactgataaaggagaagagctcattgcagatgttgtcctatttgcgacagggcgcacaccaaactcccagagactgaacttgcaagctgcaggcgttgagattgaccgggttggagccatcaaggttgacgaatattctcgtacttctgctcctagtgtatgggctgtgggtgatgtaacaaaccggattaatttaacacctgttgcatgatggaggcaacttgctttgctaaaactgt

SEQ ID NO: 5099 - DNA, 263 bp, Zea mays
  misc_feature: Incyte ID No: 700456358H1
  unsure 126, 166, 185, 191: a, t, c, g, or other
gctctggtactctcttctctctccctgctgacccaagtcccacgcctgcgtctcgtgatgccgccgaaatcgaagggcgtgccgccgccgcggagccggtggccgtcgaggacctcttcgcctcgntccaccgccacatcgaggcaggtgctttcaaacaggccgncaaggtcgccgaccaagtnctcaangcagcgccgggagatgaggacgcggtgcgatgcaaggtggtggcatacatcaaggccgacgagatcgacaag

SEQ ID NO: 5100 - DNA, 261 bp, Zea mays
  misc_feature: Incyte ID No: 700456359H1
ggaggcggacaaggtaagcagcaatcgcaggaaccctagcgccgccgcacccgcaggaatgggtatcgacctcgtcgccggtgggaggaataagaagaccaagcgcactgcgcccaagtctgacgatgtctacctcaagctcctcgtcaagctctaccgtttcttggtcaggaggaccaagagcaatttcaacgctgtcattctcaagaggcttttcatgagtaaaaccaaccgaccaccaatctccatgcgccgccttgt

SEQ ID NO: 5101 - DNA, 262 bp, Zea mays
  misc_feature: Incyte ID No: 700456360H1
cttggacacccacgccaagtttgggatatttccttcctggggtctttcacagaagctttctccgcatcattgggccgaatagagcaagggaagtgtcactaacttgcatgcctgttactgctgaaatggcagagaggtgggggcttgttaaccacgtcgtggatgataatgaggtgctgagtaaggcgatagaggttgctgaggctattgtgaggaacaaccgcaacttagttgtattgtacaaatcggttataaatgatgg

SEQ ID NO: 5102 - DNA, 263 bp, Zea mays
  misc_feature: Incyte ID No: 700456361H1
ctggaccaatctgccaccacactttgatcacacacaggaagttgagatcagaaaaatgcaggctgccgctactgccgccgggttctcggccgtgctgcccgccaagggaggccggcggcgaggagcagcgtggtggcccgtgtccccgccacaaggaggagcgtccgtgtagctgccgtcgtcgcgaccgaggccgcgcagatcgactacagctccaagcgtctcggtgttcccgatggaggcctgcgacctgcttggtggcg

SEQ ID NO: 5103 - DNA, 275 bp, Zea mays
  misc_feature: Incyte ID No: 700456363H1
  unsure 19, 29, 103, 122, 146, 185, 201, 222, 227, 238, 240, 244, 254, 259-260: a, t, c, g, or other
ggcatatggtccaattgtnaattcaaganattatttcttggtgtcatgcccatattttctggtgaatcacaatggagagaccagtttagcaggatcgcctgtntttactgaggatagcagtnttgcaataggattcgttctacganattgccacaatggtaatcaaatgaaggtggcaatatcancaaaacgttaccgtanagtaaaggagagaattaatgnagcgnaactggaaaancnaccntaaggttganaaaanntgcaaaaaaggcagt

SEQ ID NO: 5104 - DNA, 274 bp, Zea mays
  misc_feature: Incyte ID No: 700456364H1
  unsure 141, 180-181, 265: a, t, c, g, or other
caaaatctgcacgagagacagacgacgagatggccgatgcggaggacgccgccgccgcgcgccgacgggacgccataaccgactaccgcaagaagctgctcaactgcagggagctcgagtcgcgcgtcggcaccgtgaganaaagccttaaaaatgcaaagagggattttaccaagactnnagacgacttgaaatctctgcagagcgtggggcaaataattggagaggttctccgacctcttgataatgaagctttattgtgaangccacaatg

SEQ ID NO: 5105 - DNA, 274 bp, Zea mays
  misc_feature: Incyte ID No: 700456366H1
  unsure 89, 141, 235, 237, 264, 273: a, t, c, g, or other
cctgatcagagatctggaaaggttgagctccagtatttgcatgattatgctggagttaatgcaagcatcggtctgacagccaatcctgnagtcaacctctctgctgcctttggtactaaggctgttgcagttggtgccganatctcacttgatactgcaactgggaacttgactaaatacaatgctgcactgaggttcactcatgaagaccttgtcgcatccctgaacctgaacnanaagggcgacacttactggagcctactnatcaaaggng

SEQ ID NO: 5106 - DNA, 95 bp, Zea mays
  misc_feature: Incyte ID No: 700456367H1
  unsure 49, 82: a, t, c, g, or other
cttatggacagattgtcctaactatggctgcctcaagttcctgaagtgntgcccagagtttcttggcaagttgaagcttttnactgaagttcagt

SEQ ID NO: 5107 - DNA, 268 bp, Zea mays
  misc_feature: Incyte ID No: 700456368H1
  unsure 7, 52, 127, 224, 256: a, t, c, g, or other
gtgggcngcgccttcgacggcgcgtccatgaaccccgccgtgtccttcggcnccgccctcgtcagctgggagtggggctaccagtgggtgtactgggtcggccccctcatcggcggcggcctcgccngcgtcatctacgagctgctcttcatctcccacacccacgagcagctcccctccaccgactactaaaagccgaagccgaccgacccaggggtgcgcangcaggcagtagcatccagcgctctctccccgntcgccgccgttt

SEQ ID NO: 5108 - DNA, 266 bp, Zea mays
  misc_feature: Incyte ID No: 700456369H1
attatgaatgagactttgataacctagtgctgtgtgttatcaattactatggacttaagtggatatatttgcagagtgtatcgcgattggattctgatattctaagtgtagctcttcgagtagtatatgtttgtatattcagagtccccatgtacaaagaggccgttttaattgaggtttccgtacctcgattccctgtgcaaagttttcatcgatgttttagactacaacacatctgtatattttgtcgagagcatcagtttctt

SEQ ID NO: 5109 - DNA, 264 bp, Zea mays
  misc_feature: Incyte ID No: 700456371H1
  unsure 136, 187, 221: a, t, c, g, or other
ccactacaggtaaggaagaggaggagggcaggatgtcgcaccgtaagttcgagcacccgaggcacggctccctcggcttccttcccaggaagcgctcctcccgccaccgcggcaaggtgaagtcatttcccagggntgaccccaagaagccttgccatctcactgccttccttgggctacaaggctngtcatgactcacattgtccgtgaggttgagaagncaggatccaaactccataagaaggaaattgtgaggctgttacc

SEQ ID NO: 5110 - DNA, 258 bp, Zea mays
  misc_feature: Incyte ID No: 700456374H1
aaatcaacaaggataatccggaacctgatgatgaaggaacagaacaagagatgggtacatttaagaaagctactgaagaagttatggcaacacggaggattgtaaaggttcggcgccagcagacgtcatcagcttcttctaaccctttctctgcaatcagatttgcccccactgattctagtgctcaaacaagtgctcctgtcccagaggtccaaccttcagatgtcaaagttgacgagggaagcaatggtagcggga

SEQ ID NO: 5111 - DNA, 258 bp, Zea mays
  misc_feature: Incyte ID No: 700456376H1
  unsure 75: a, t, c, g, or other
gcgctgcgctcgcgtctctcgtccccctcagatccaccgactcgctctgagtctctgaccgccccttccgtcgtncccgttcgaaggcgcggcaagcgagcgattcagccagattcgattcgacatgaatcccgagtacgactaccttttcaaacttctgcttattggtgattctggtgttgggaaatcatgcttgcttctcagatttgcggatgattcatatttggacagctacatcagcacaattggggttgattt

SEQ ID NO: 5112 - DNA, 264 bp, Zea mays
  misc_feature: Incyte ID No: 700456378H1
aagcaaagtccatattgattgctgcaagaaaaaaaatgctgagattaatcatcaccatactgtttaagtttccccatgcttcaatgtctcgctggggctgatgacttaggaagatggactcagttgctcgaaggctggaagagaatttatgggatcaaaacatgatcggaccttggaactaaaaactccaaccaagaaaacggaaaccaaatacacaacggggctcatgaactggacgagcaaaagcacatgccatagatgctg

SEQ ID NO: 5113 - DNA, 269 bp, Zea mays
  misc_feature: Incyte ID No: 700456379H1
  unsure 149, 190: a, t, c, g, or other
aaccccggcgaagttgttaaacctgaccaattcaaggcaataaacgacgaggggatgccgatttaccagaggcccttcatgaaggggaagctctacattcatttcacggtggagttccccgactcgctggcaccagagcagtgcaaggntctcgagtcggtacttccgccaaagccttcgtccaagctgnccgacatggagatcgatgaatgccgaggggccacccatgcatgatgtgaacaacatcgaggaagaattcgcaggaagca

SEQ ID NO: 5114 - DNA, 274 bp, Zea mays
  misc_feature: Incyte ID No: 700456381H1
  unsure 78-101, 120, 138, 145, 187, 228, 233, 263: a, t, c, g, or other
caacccttcgtactcagtttccatcattggcatggcgtccgataccgagggcatcgccgccctcttctcgatgtacannnnnnnnnnnnnnnnnnnnnnnnccgacgagcccagccctcntttcccagcgcttcccgntgccgtnaactcctcctcgccgctgtaccctcaagccggggccgaggancccaacccttctgtggcgcctccgtcaattcccgtcccgangattnggccagtctcaaaacctagcgagttcacanattccacgggg

SEQ ID NO: 5115 - DNA, 266 bp, Zea mays
  misc_feature: Incyte ID No: 700456384H1
  unsure 204: a, t, c, g, or other
aaccccggcgaagttgttaaacctgaccaattcaaggcaataaacgacgaggggatgccgatttaccagaggcccttcatgaaggggaagctctacattcatttcacggtggagttccccgactcgctggcaccagagcagtgcaaggctctcgagtcggtacttccgccaaagccttcgtccaagctgacagacatggagatncgatgaatgcgaggagacaaccatggcatgatgtgaacaacatcgaggaagagtgcgcagga

SEQ ID NO: 5116 - DNA, 265 bp, Zea mays
  misc_feature: Incyte ID No: 700456385H1
atcgcctgcaacagcctggaccatgacccggacctccagcacatgccgctcttcgttgtctcccccaagctgttcggcaacatatggtcctacttctaccagcggaccctggccttcgacgccgcctcgaaattcctcatcagctaccagcactggaccttctacccggtaatgtgcatcgccaggataaatcttctggcgcagtccgctgtcttcgtcctgaccgagaagagggtgccgcagcggctgcttgagatcgccggtg

SEQ ID NO: 5117 - DNA, 259 bp, Zea mays
  misc_feature: Incyte ID No: 700456387H1
gcgcgacggaaaccccaaacccaacctcatctcttttctcggcctctaccgccccctcgatcggtcggccggtcagctatgacgccgggaagctcggccgccggatccggcgtcgtcgttcctcggaacttcaggctcctagaagagcttgaacgtggagagaagggcattgcagatgggacagtgagctatggaatggatgacgcagatgacatctacatgcgatcatggactggcactattattggccctcataata

SEQ ID NO: 5118 - DNA, 258 bp, Zea mays
  misc_feature: Incyte ID No: 700456388H1
ggcttctgcagttatcctgcttgtgatgcagtggttgtcggggggacttgtgttgattctctgtattgtgaagcgaggagaattctccaggacaggttgtcacaaagttgggaagcagcttctcaacagtggcttttgtaattgttgtggcaacttgcaccattttagcaatggttgcaaccgtaccacttgcccagcttttatgttttcatgtccttctgtgaaaaagggaattagcacatatgattacatcatagc

SEQ ID NO: 5119 - DNA, 256 bp, Zea mays
  misc_feature: Incyte ID No: 700456389H1
  unsure 32: a, t, c, g, or other
gaagagaaggtcatggatttgtacaagaaganatgtgaaggtcctctaagaacaggaatcaggacagggattataagtggaatcggttttggagtttcctttttcttgctatttggggtatatgcagctagcttttatgctggtgctcggcttgttgaggacaggaagacaacctttcctaaagttttcagggttttcctagctcttgcaatggcggcaattggagtgtcgcaatcaagtacccttacatcagatt

SEQ ID NO: 5120 - DNA, 259 bp, Zea mays
  misc_feature: Incyte ID No: 700456390H1
  unsure 6, 8-9, 12, 27, 32, 39, 83, 85, 93, 104, 106, 124, 169, 205, 210, 217,227-230, 239-240, 252, 257-258: a, t, c, g, or other
cttacngnnaantgctgtgcaccttgnagaanaagcagnaatcaaaatgagcacaagcttagggtgggtgtccgtggaggtgnanactgtganttcagaggggnanaactcagacagaaagcanggttattacttggtaaagagcaaggatggtgtagacacaactttncacctcttgggcatactacaactaggagttaccctncgaanatggagnagtataattnnnnagacgaatnntgtctcatttcntctcnnt

SEQ ID NO: 5121 - DNA, 256 bp, Zea mays
  misc_feature: Incyte ID No: 700456391H1
ggctcctatctggtataggacggagctgagcttctagcaacgtacagtgtatccgccatgagtccttccggggcggtgatcacgccagaaaccctcaagtacatgtccaagtaccagggacgtgagatcacgcaggtggactgcgcacgggaggcgatgaggctgatccacgcggaagacaagaacctcaaggcctaggactcagcgtgggagctgaagaagaagttcggcaaggcgtgagcaccatggtcctcgt

SEQ ID NO: 5122 - DNA, 264 bp, Zea mays
  misc_feature: Incyte ID No: 700456394H1
  unsure 159, 185, 201: a, t, c, g, or other
agcgagctctggaagtattccctcgtaccagttcgtatgggtatagttccatgcaggtcacggatgatggctatggaggacttccatcctatgcatcaaaggcatatgaagaacatgtaccacgtttggaaatgactgtacctgctagtggcatctcanaagtaatgggaaaacatggcacaaantggagcagcattaganagatttctggagctcacattgaaattattgaaccaaaatcctctcgtcatgagcatattgctt

SEQ ID NO: 5123 - DNA, 267 bp, Zea mays
  misc_feature: Incyte ID No: 700456396H1
ggagaccacggctcagatcctggtccgggccctcaatcccctggattacatgaagtggagaaggaaatcagcatactggaaagccctcaaggtgttcaagctgcctgtggagttcctgctgctcctcacagtccccgtcgtggacccggacaaggatgaccagaactggaaacggcccctcaactgtctgcatctggttatcagccccctggttgtggtcctgaccctgcagtcggggactatggtgtctatgagataggcggctcg

SEQ ID NO: 5124 - DNA, 209 bp, Zea mays
  misc_feature: Incyte ID No: 700456403H1
  unsure 162, 164-165, 169: a, t, c, g, or other
cttccctctccgcactcgcttcctcctcgtcttcacccgccgccgcccccaacccttcttccaaccctttgcacgagccgaggcctctccacctctcgctcaagcccgtcttacccctccccaaaccgcatgcgctctcctgctccgcgccgcacatccccngnnccgncgctggggacggatcgggcgtcgggaatggaggcaaggat

SEQ ID NO: 5125 - DNA, 281 bp, Zea mays
  misc_feature: Incyte ID No: 700456404H1
  unsure 9, 11, 13, 50, 53, 72, 82, 89, 123, 150, 152, 155-156, 168, 225, 234,243: a, t, c, g, or other
gcgtgtccntngnggcgaacatctcgggcggccacctgaacccggccgtnacnttcgggctggccgtgggcngccacatcancatcctnacgggcgtcttctactgggtggcccagctgctgngcgccaccgtggcgtgcctgctcctcngnttnntccacccacggnaaggccatcccgacgcacgccgtcgcgggcatcagcgagctgaaaggcgtcgtgttngaggtcgtnatcaccttngcgctcgtctaacaccgtgtatgccaccgccgccgacc

SEQ ID NO: 5126 - DNA, 280 bp, Zea mays
  misc_feature: Incyte ID No: 700456405H1
ttcaaagccctgcggcgatttcgattcttcccctctatctccaggtatacccatcggagcagcactgacaaaaattctccagatatggcaagcaaaaggattcagaaggaactcatggatctgcaaaaggacccaccgacatcatgcagtgcagggcctgctggagaggatctattccactggcaggccacaatcatgggtcctagtgacagcccctatgcaggcggggttttctttattaatatccattttcctcctgactacccctttaagcctccaa

SEQ ID NO: 5127 - DNA, 279 bp, Zea mays
  misc_feature: Incyte ID No: 700456406H1
cttcacgccggcaaccgctaccgcctcgttcgccgcgctccgggccacatctccgcctccgcgcgcccgctaccacggcctcgtcctccttcagggcggggaggagaagacacggtactgcaccgatcacctcgagctcttcaggcaggagagctacttcgcctatctctttggagtgcaggaaccagggttctacggcgcaattgacatcgcctctggacagtcaattttgttcgctccaagatgccagctgactatgctgtttggatgggtgaaata

SEQ ID NO: 5128 - DNA, 274 bp, Zea mays
  misc_feature: Incyte ID No: 700456408H1
  unsure 3, 5-6, 18, 134, 179, 183-189, 194: a, t, c, g, or other
aanannaggagaagcgangaagccaggcttcgagaacaagactgcagggggagggggaggaccaagcgaaaggggaatagagcaagatgggcggcgcactgctgcttgcgctcctcctcgtctctgctgctgcngcccctcaggtacttggagttggcaatggagacaatcacatgagnatcnnnnnnngaggncatcatcgagacagtcaacaaccatcccagtgctgggtggacagcctcacgtaatccttacttttcaaatataccatggc

SEQ ID NO: 5129 - DNA, 281 bp, Zea mays
  misc_feature: Incyte ID No: 700456412H1
  unsure 23, 164: a, t, c, g, or other
caaatggaggggccacgtatggnattgctgataacaaggtatcacagacatttgttgaggtagaagttggcaatttgatgagaaaaacaagtaccagtaagggtctaaatcctacatggaacagtacatttaacatggtacttcatggagagacaggcattgtncaagtttcttctgtatgaattggattctggcggtgtcaaattcaattacttgacaagctgtgagataaaggacactgaagcagtaatgtaaacaggtaaagtatgttcatgatggtt

SEQ ID NO: 5130 - DNA, 263 bp, Zea mays
  misc_feature: Incyte ID No: 700456415H1
  unsure 24: a, t, c, g, or other
cattgacaagggtagagatctcantgctgtgttagaacacttctcaaaatttgttaaacctgcttttgaagacttcatcctcccaacgaagaagtatgctgatgttatcatcccacgcggaggagacaagatgtggcaattgacctaatcgttcagcatattcggactaaacttggacaacatgatcttcgtaaaatacaccctaatctgtatgtaattcagactacttatcagatacgaggcatgcacacaataataaggga

SEQ ID NO: 5131 - DNA, 108 bp, Zea mays
  misc_feature: Incyte ID No: 700456416H1
  unsure 2: a, t, c, g, or other
gnacagcagcaccggcagcaccaccaaccccagggcagccgcgccgccagctcacgacaagcttagcagccccttcgcaattcgttagggtatttattggttacaatt

SEQ ID NO: 5132 - DNA, 282 bp, Zea mays
  misc_feature: Incyte ID No: 700456417H1
  unsure 37, 39, 41-48, 94, 142: a, t, c, g, or other
cactacccagtaacatggcctatcctattccacaagncntnnnnnnnnacattttacagtggttatggggacatttatccccaagcaactccgntgcagcagttggcattcacactcaagcatgcctcatcgtcggcaactncaggtgttccagtgacgtccacaccaacaagcatggctacaaaggggaactcaatcttggatgcggagatggataaacgatcccgaaggaaattccaggaactaccggtttcgaagggcccagcaacagaaagtcaggta

SEQ ID NO: 5133 - DNA, 284 bp, Zea mays
  misc_feature: Incyte ID No: 700456418H1
  unsure 40, 118, 122-123, 125, 128-130, 132, 155, 163, 166, 178, 182, 187, 234,246, 261, 267, 271, 274, 282: a, t, c, g, or other
acattcagctcgactgttcgaatgcaggcaagaatccggnctgcccaaagcaagtccaggttcagggaactgaagaactctacataaaaccccaccacaagggcgcagattccacacngttnntnttnnncncactcctctcctctcctctcgcnggcgcatngcncgactgtcagtnagcnttcgnggatggccgcggaggaggagcagggcttccgcccgctggaacgagtngtccctgctcgnctacatcaaggccangccggngctngcntcccgctnaa

SEQ ID NO: 5134 - DNA, 159 bp, Zea mays
  misc_feature: Incyte ID No: 700456420H1
  unsure 3, 6-7, 15-16, 31, 35-36, 43, 67, 79, 81, 97, 99, 117, 127, 150: a, t, c, g, or other
gcngtnnccctggtnncagcaataacgctgncgtnngcggagncgaagtgtaccccggactactacnggtcgacgtgcncngacgtggaggcaatcntncaggcagtggtggccaanaaggtgaatnagaccttcgtcacagtcccggcnacgctcagg

SEQ ID NO: 5135 - DNA, 260 bp, Zea mays
  misc_feature: Incyte ID No: 700456422H1
  unsure 30, 62-63: a, t, c, g, or other
gggctccgacgtcgtcatcatccccgccanggtgcccaggaagccacggcatgactagggannacctcttcaacatcaacgccggcatcgttaaggggctctgcactgccatcgccaagcactgcccaacgctcttgtcaatatgatcagcaaccctgttaactccactgtcccgattgcggcggaggttttcaagaaggctggtacttatgatgcgaagaagctgtttggtgtgactactcttgatgttgttcgtgcta

SEQ ID NO: 5136 - DNA, 272 bp, Zea mays
  misc_feature: Incyte ID No: 700456423H1
gacgagattattcgattggagtttagtcattatgatgtcaagtcgtctaaaactataccagcaaaggattttgcattgtccatggttgcttctgctgacatgaaccatatcaacaagctgcttgatagagctgatggtttggtcaaggagccagatctgaaggacatacgcatcacctttgaggtatgacttgcgttcttgatatcaaaatatttttgcactcagtttatctcttattatttcatgaatgtgtatttgcaacttcaggagtt

SEQ ID NO: 5137 - DNA, 276 bp, Zea mays
  misc_feature: Incyte ID No: 700456426H1
gactgagggacctttagccttagaggtggctgctgcagagaattcgaccctccaggatggtgctggcgcttacctagcccccgagggtgttggcggggatgattcggctcggatgggtagcgcaagtgcgacccagcccccgaggtgttgccggagatgatccgactcggatgggtagcgcaagtgtgacccagtcctcgagggtgtccgagcgggttctccctcttgcacttccatggatgttcacgtagggtcttctcctaccacactgtggtt

SEQ ID NO: 5138 - DNA, 278 bp, Zea mays
  misc_feature: Incyte ID No: 700456427H1
  unsure 185-186, 256, 259: a, t, c, g, or other
gggagagatttccctgaagatcttttcgaaactgtcatagcaaggcttcctgttgctgcaatttttcgattccgcactgtctgccgaaggtggtcttcccttttgggctcagacagtttctctcgtcagtactctgaagctccacaggactgccatggttctatacaatcactcatgagaattcnnaacaacaatgttgcgatgtatgatcctttgctgaagaaatggcaccaccaatctgttcctctcaatcatncgntcctagttatccagtggca

SEQ ID NO: 5139 - DNA, 279 bp, Zea mays
  misc_feature: Incyte ID No: 700456430H1
agcacgagacgccagcgccatccatcgcggcaaaagccgagacgacccaggaatctcggcaccgtcgcccccctttctctctcgctcaaaagttgctgctggagccctctcccctctctccgaccaccaaccatggatgaggcgcagttgtggagtcaaaggatggaaccatctcggttgcttctgcatttgctggttatcaggaagctgtgcaagacagggatcacaaattcttgacaaaagcagtggaagaagcatatcgaggagtcgatgcggtga

SEQ ID NO: 5140 - DNA, 285 bp, Zea mays
  misc_feature: Incyte ID No: 700456433H1
  unsure 2: a, t, c, g, or other
anaagatatgtacgctccctgcagatatcggaggtggtgaatcacatgaaggacttgattgagttcagccacaagaacggccttggtcctaaagagagcctgaacagctattctaaaaccatggcgaagtttcagaatatgcatgattcaagacagctcatggctgctgccaaccttgccaataaccagagcaacaccaaactaatggggaccaaacaagaagcaagtgcttctgcgaccaaccagactcctggtgtcggagccatcggcaataatgctcttcag

SEQ ID NO: 5141 - DNA, 277 bp, Zea mays
  misc_feature: Incyte ID No: 700456435H1
  unsure 144, 185-186, 248-250: a, t, c, g, or other
cctcgaggcgcgtggtaggaacttgatcggcgacgcgtacaaggatcccatcaccagcttcccagacctccacaagttctccaacgagaacccagaggcgtactggaagatggtatttgaggatatgggtatccaattcaggtncagccatcctgcatctggagagagaacactgcatatcctgnntgtcgagtggctaccaggcgccgagctcaacgctgctgttaattgcttgactgctaaacccnnngaggagctccgacggtccggccatgta

SEQ ID NO: 5142 - DNA, 274 bp, Zea mays
  misc_feature: Incyte ID No: 700456436H1
  unsure 125-126: a, t, c, g, or other
gaggaacagagcagacgacgcgaggcgatttctgcgggtttgcttgctccatctgtagaccttaggccgccgccgggcgaccgtgcgcgtgcggtgctcacgccccaccccgctcaggtgaaggnncttcaagatgggcgggtacacgaagctgacaagaacattgagatctggagggtgaagaagttaatcaaggcacttgatgctgcaaggggcaatggaactagcatgatttctctcatcatgccacctcgtgatcagatttcacgcgtca

SEQ ID NO: 5143 - DNA, 274 bp, Zea mays
  misc_feature: Incyte ID No: 700456437H1
gggatgatgttgttattcagtttgtgaatcctaaagtgcaagcttcaattggtgctaatacatgggtggtcagtggaactccacagacaaagaagctgcaagatctgcttccgtccattatcaaccagctcggccctgacacctagacaacctgcggaggcttgcggagaattccagaagcaggcccctggtgcttcaggtgcagaggctggcgccagcgctggtgctgctcaggacgatgacgatgacgttcctgagctcgtccctggagaga

SEQ ID NO: 5144 - DNA, 272 bp, Zea mays
  misc_feature: Incyte ID No: 700456438H1
aaagttgaactcagcttgagacaatcacaccctcccagattgctcttgttcttttgtcaattgttcgttttggttacctgacatcccaagcgttccagctagaacagagaatcatatcgagtcctatggccctgattggcacagcttgtgagctttgagcaccataaacttatgtcctgtttgtgttcgagctatgagcagtccgtttcatgtatgtataaataaaatctgatggacggagtttattttcacgaattcatgtatacacaatg

SEQ ID NO: 5145 - DNA, 272 bp, Zea mays
  misc_feature: Incyte ID No: 700456442H1
  unsure 4-5, 13, 16-17, 21, 25, 42, 44, 51, 72, 76, 80, 113, 142, 151, 153, 155,208, 217, 225, 249, 260, 271: a, t, c, g, or other
cgannaagccggnganntcgncatnattgaaggccccattcntngcttcanatgtgatgcttctactgctantgtnctancgtgtggtaagcagggttggccacaaattcctngaggacgggaccaaggtccgatacctggncaagaccgntnangtaatcgacagtgttgagaagtgggtaaaggtttttaaggaaggaaatcgganaacagtttnagcatganaacctgcaaaagctctgaacgcanactgcgtcgtncatgttagatng

SEQ ID NO: 5146 - DNA, 274 bp, Zea mays
  misc_feature: Incyte ID No: 700456444H1
aaatagtcaatacccaggtacttgctttcaatggccagcctgttaaaaatttaaagaacttggcgaccatggtggaaaattgcaaggatgaatttttgaagtttgatctggagtatgaccagattgttgtcctcgagacgaaaactgcaaaggctgctacccaggacattctgacgacgcactgtataccttctgcaacgtcggatgaccttaaggcctagtgggagaagggagcatgacgcagccctgggcctgggccagggccatcaggtgg

SEQ ID NO: 5147 - DNA, 273 bp, Zea mays
  misc_feature: Incyte ID No: 700456445H1
ttgtgttgaagatgaccaaaggttgctggtctatgaattcatgcctcgtggcagtttggataaccatctttttagaaggtctcttcctctcccatgggcaatcagaatgaaggttgcactcggagcagcaaagggtctggcttccttcatgaagaagcagaaagaccagtcatttatcgcgattttaaaacatctaacatactgctggatgcggagtataacgcaaagctctctgattttgggcttgcgaaagacggacctgtaggtgataaa

SEQ ID NO: 5148 - DNA, 274 bp, Zea mays
  misc_feature: Incyte ID No: 700456446H1
  unsure 142: a, t, c, g, or other
gccctcaagctcgtcgacgaggcttacgcggtgctgtctgatccagagaagcgagaggggtttgattcgagcaacgttttcacccggttcgttcggtccggtgtcgttgatgctccaccgcccggtggcacactcgtccgtntgacagggtgagcagccttcacacaaacaagattatggcgttaaatggtacgagcaatgcagtctcgcgtaccaaccacgccgacaggccatgctttgatggaagggatcccgtctttcaaatgtggcgagt

SEQ ID NO: 5149 - DNA, 279 bp, Zea mays
  misc_feature: Incyte ID No: 700456447H1
acaatccagcgagctcgaaaaaaagggcacgaatacgaaccccaatccagggccggaggagggcgagcgaactcaaaagcaagccgttccagtccaatccgcctcagtccaaatctaatcgccgggtttaggcagaaggggcgggacgcggcgaggtttaggcggggtttgttttgtcccttccgtgcgattctgctctccgcgcgggaggcaagtactgacggaagcgaaggcgaaggcggaggagggggtccccggcggtggaatggaacgcgccga

SEQ ID NO: 5150 - DNA, 274 bp, Zea mays
  misc_feature: Incyte ID No: 700456450H1
  unsure 2, 4, 28, 124: a, t, c, g, or other
angnagcccaagtgctctcttgggtgcnctcgtcgccggtggcagtgagccagtgatgcatcttcatctccggcttccttattaggatcaacccgtcgatcgatcatggcgtcgtcgagctcgnctgctactaccagtgtgacagtcagggtctcaaggctcgagatgcctgcatcgtcggcgtcgcccgcacgcccatcggcgcacttctcgggtcgctgtcgtccctccccgccaccaagctcggctccatcgccatccagggtgctctcaa

SEQ ID NO: 5151 - DNA, 274 bp, Zea mays
  misc_feature: Incyte ID No: 700456451H1
  unsure 2, 84, 169-192, 208, 212, 262: a, t, c, g, or other
gngggatgaggtcatccggaagaaggaggaggagatcgagaccagagacaaggagcaggagcgtctccaggccgagctcagganggcgcaacgcgcaagggagttcaagcctaccgtgagcttccccctcgtcaagtcttgctggagaaagagcaagaagcagacgacnnnnnnnnnnnnnnnnnnnnnnnnggcggccacgagaggnagangccgtgcccggcgtacgtgctctggctcaaggaccagtggaccgaggtcnagaaggagaacc

SEQ ID NO: 5152 - DNA, 273 bp, Zea mays
  misc_feature: Incyte ID No: 700456452H1
  unsure 130: a, t, c, g, or other
cacattcagctcgactgttcgaatgcaggcaagaatccggcctgcccaaagcaagtccaggttcagggaactgaagaactctacataaaaccccaccacaagggcgcagattccacacggttcctctctncaccactctctcctctcctctcgccggcgcatcgcccgactgtcagtcagcctcagccatggccgcggaggaggagcagggcttccgcccgctggacgagtcgtccctgctcgcctacatcaaggccacgccggcgctcgcct

SEQ ID NO: 5153 - DNA, 269 bp, Zea mays
  misc_feature: Incyte ID No: 700456453H1
  unsure 177, 222: a, t, c, g, or other
agctggtgaagcttgctacagagaggggccgcaaagctaggcctaacttgaaggtgggcatttgtggagaacacggtggagagccttcctctgtggccttcttcgcgaaggctgggctggattacgtttcttgctccctttcagggttccgattgctaggctagctgcagctcaggngcttgtctgaggctgcctcctcattggcaaccggattgcctgctnctggtggatgtggtgatcaacagtattattacagagccatgctatgt

SEQ ID NO: 5154 - DNA, 269 bp, Zea mays
  misc_feature: Incyte ID No: 700456454H1
aaatagtcaatacccaggtacttgctttcaatggccagcctgttaaaaatttaaagaacttggcgaccatggtggaaaattgcaaggatgaatttttgaagtttgatctggagtatgaccagattgttgtcctcgagacgaaaactgcaaaggctgctacccaggacattctgacgacgcactgtataccttctgcaacgtcggatgaccttaaggcctagtgggagaagggagcatgacgcagccctgggcctgggccagggccatca

SEQ ID NO: 5155 - DNA, 269 bp, Zea mays
  misc_feature: Incyte ID No: 700456455H1
gtcctgttcaagtgaccaaagatggcatactgatatgcatgagttctgttgacctaatggatgttactactgttggaaaatcatcatttacttcgcaagtaactaccatcaacgatctgaaggctggtcctggagtcttcaccttcaaccttacttgggatgatatttctaagaacctacagcccatgatatcgaacccaatgagcacctataaactgtacagaaatcccagaaacaagaatgcaggaaatttcatgagattatcagac

SEQ ID NO: 5156 - DNA, 267 bp, Zea mays
  misc_feature: Incyte ID No: 700456456H1
  unsure 2, 7, 12, 63, 94-95, 105, 124, 178, 187, 192, 199, 215, 227, 234-235,240, 257, 266: a, t, c, g, or other
cngaggncgtgnggctgtacgtcctctgggatcagcttatggggctgctgcctcacgtaagtncaacattgaagccattatcactgggttaaanngacaagggcnctcaaggtagtctgtgggnagaattgcagcgaacgatgactcacagagtgtttcagagtttgatatatcaganctttacagnctttncctgcanctgttccgaagtccgntgatagctcaanatctganngtagngaatcacttggatcacnaccagaaana

SEQ ID NO: 5157 - DNA, 273 bp, Zea mays
  misc_feature: Incyte ID No: 700456458H1
  unsure 15: a, t, c, g, or other
gccgcgacaggaggnaggagcagcagcggcaggggaggcccggcgatctcttctgctgcgtgcggcgagggagtaaaaggagccgcgacaggatgcactcctttgggcaccgcgccaacgcggtggcaacgttcgcggtcaccatactggccgcgatttgcttcgccgcctccttctccgacaacttcaacaccccaacacccactgcctccgttaagatcttgaatctaaactggttccagaaggaggccaacggcaacgacgaggttagca

SEQ ID NO: 5158 - DNA, 273 bp, Zea mays
  misc_feature: Incyte ID No: 700456460H1
  unsure 188: a, t, c, g, or other
tttgtatcagttagatgttcgctattgggtgaaccccaaccaggtctaccaaagtggcctcaaaaccagtcacatcgagctacctgatgctaaaaccatctgcctgatggaatgcccacttcctgccgaagatggcttgaattttgtttgcgattatccagaaggtgacatacgcctctctgtcgacncactggattgacagggactacgattacttcgagtacctcacaccagacatgaggaatagttctcttcagctgcagggtccatgtt

SEQ ID NO: 5159 - DNA, 270 bp, Zea mays
  misc_feature: Incyte ID No: 700456461H1
  unsure 19: a, t, c, g, or other
gcttctgcagttatcctgncttgtgatgcagtggttgtcggggggacttgtgttgattctctgtattgtgaagcgaggagaattctccaggcaggttgtcacaaagttgggaagcagcttctcaacagtggcttttgtattgttgtggcaacttgcaccattttagcaatggttgcaaccgtaccacttgcccagcttttatgttttcatgtccttcttgtgaaaaagggaattagcacatatgattacatcatagcttgagggagcagg

SEQ ID NO: 5160 - DNA, 277 bp, Zea mays
  misc_feature: Incyte ID No: 700456462H1
gcctctggtggctggccccctttctctcctgttacatcacaatctcataggcctctgcaagctccaccgacttttatggcagtgagacctcctatttccgtctctcctcttggtgcaactccaccgcaaggtcccattgcattgacaccaccaaatatgcccaccatgtaccgcggccagcatccaccagtaccaaattttactggttcagcgccattggtttccaggcctcctggtggtggggctcagtcttttcctacagctgcgcctcaaggcc

SEQ ID NO: 5161 - DNA, 219 bp, Zea mays
  misc_feature: Incyte ID No: 700456463H1
  unsure 180: a, t, c, g, or other
ttctccatccagtagcgatgaggagcagttggctagttgttagcggtttccctagtttctcttcctcctgtgttccccgtttcagtttgcttatagccccgaagactcttttctcccgtagtgtcggaatgccagggtctgttgcgtaactgggatccgaatgtaccctgctgtgttcancgttacattgaatggatctgaatgaaagtgggttagatt

SEQ ID NO: 5162 - DNA, 277 bp, Zea mays
  misc_feature: Incyte ID No: 700456465H1
  unsure 130-146: a, t, c, g, or other
aagcttgctactgtgatttctcgtccgagcagcggcggaggagagagagagagcatggccgaccacaaggaggagcctgtgccggagtctgtgatggacaagatcaccgagaagttccacggcggggacnnnnnnnnnnnnnnnnntgactcggacgacgagaagaaggggtcctcgttggcgtcggcggcggaagccatgaaggccaagatctaccgccttttcggccgggagaggcccgtccactccgtcctcggcggcggcaagctgccgatct

SEQ ID NO: 5163 - DNA, 282 bp, Zea mays
  misc_feature: Incyte ID No: 700456469H1
ccgaaagccagcgaccgtggccatgcagtcgccggagctctcctcttcctccccggttctcctcaatatagggggcaagaagtacgcgacaaccgtggagacgctgatgcagcgggagcccgactccatgctcgccgccatgttcagcgggcggcacacgctccatgatcacccaaccacggggaaggggatggtcttcgtggacagggacgggaagcacttccgccacgtgctcaattggctcagggacggcgccatccccgtgctgtccgagtccgacta

SEQ ID NO: 5164 - DNA, 280 bp, Zea mays
  misc_feature: Incyte ID No: 700456470H1
  unsure 3, 7, 24, 33, 35, 41, 60, 79, 160, 163, 173, 191, 201, 209, 212, 232,242, 249, 259, 264, 276: a, t, c, g, or other
aanttcntccttcaaagaagcagnatcggcaananccgagntgaagctgccatggaattnttacaagaattactatagngatgtcctctggaagttttgtggaagagagtccagaaaaccttctagacaatgatccctcatttttctgcaggtatactgntgnagttgcaacncagcttcctgaaagcacntcactacgcntagcagangtnctctggaatcccagattccncgtttgatcngtagganataggactanttggntatatgaggatnaata

SEQ ID NO: 5165 - DNA, 269 bp, Zea mays
  misc_feature: Incyte ID No: 700456474H1
tgcagattcacggatcagagttcttgatggttttgagctagcgcataggtttaaaggattccgaaacacaagcagccaaatctcagcttgtttagctggaaatgggcggtatattatctcggcaagtgaggattcccagtatatatctggagaaacaatgatggtccgaaaccaagtagaaagaagggcattgtttctgtcacagatagccatgaatacttccactgccagagtgtgacagttgctgttacctggccttttgccagcac

SEQ ID NO: 5166 - DNA, 267 bp, Zea mays
  misc_feature: Incyte ID No: 700456476H1
  unsure 179: a, t, c, g, or other
catacttctataagaaagcagaacttttcccaggaagcgcttttataattggtgcagacactgcagcaaggcttgttaaccctaagtactatggaggagattacaacagaatgctggagatacttctcgaatgtaagagcatagggactacttttcttgttggtggtcgaaagattganggagatttcaaggtccttgagaacttagacattccagaagagctgagagaaatgttcattctattccggaggaaaagtttcgcataga

SEQ ID NO: 5167 - DNA, 272 bp, Zea mays
  misc_feature: Incyte ID No: 700456477H1
  unsure 91, 242, 246, 256, 258, 260, 267, 270: a, t, c, g, or other
gggatgaagaaaatcaagaaatgtcttcatgcaaatcagcaagaatagaaacgtcttgttctcttttagaacaaacacaacctgctacacnctcattgtggaaaaataaggagcagcatctatctgagaatgagcctgtggacacaaactcagacaataacttatttacagatacagatttaaaatctattgtgaaaaattctgccagtaaatctcatgctgcagaaaagctaaaaaaaaanaaangggggggccncngnttagtgntcncg

SEQ ID NO: 5168 - DNA, 285 bp, Zea mays
  misc_feature: Incyte ID No: 700456480H1
tagttgcaaaatgtatcgtctcaatttggattagacaggatacaagttatctggcggattgcccagtgtaaacctgaacctttatgatgtgtggtgtccggtattggcggcaaaaaacaattcgtttactgctgtaagtgctgcagccactgatattttgtctatttaacttgactgtttgtgtgttggtagtctatctgaagacaaatgtttatcaagaaagttatatacataatacatcttctaagcatataactttcttgataaacattgtcttcaagatag

SEQ ID NO: 5169 - DNA, 271 bp, Zea mays
  misc_feature: Incyte ID No: 700456481H1
  unsure 2, 9: a, t, c, g, or other
tngaagtcncgacctgataatgaaacctcaatgggcgatgccaacaaggagcagcaagacgcatgtggtgaacaattaaatggggatgaccttggtattgtgtccaatggagccattagcaacaccctgagtgagaagtgctctaagtttacgcactctgatgatcatttaggagaaaaaaactcagtaggtgtcccggacacatttggtgatggaaacagtgctagggagaaaaaggaggttggtggttcagcagatgttgctaccccca

SEQ ID NO: 5170 - DNA, 284 bp, Zea mays
  misc_feature: Incyte ID No: 700456483H1
tacatgacctgaataggctgaatctcatgaagacaactcaatgctccacaaaccaagaatactaaagcacataagatgtttaattttctgattttaatttttgaatttctatccaaatatagactctttagtatgacaaccttgcattggtttctttgataacatactagacatggatgactgttgaatatgttattatagtctggagaatctaattgtatgatcatatgaaacctatgagtgatcatcttactaagaacaagatatttaagcatcaaaaaaaa

SEQ ID NO: 5171 - DNA, 280 bp, Zea mays
  misc_feature: Incyte ID No: 700456485H1
  unsure 269: a, t, c, g, or other
aattgatgagcacataggctgtgccatgagtgggcttattgctgatgctagaacactagtcgagcatgctcgtgttgaaactcagaatcataggttctcatacggggagccaatgaccgtagaatcttcaacacaagctatttgtgattagctctgcgctttggcgaaggtgacgaagagtcaatgtcacggccatttggagtctctctcctaattgctggacatgatgagaatggacctagcctgtactacaccgacccatctggtanttttggcaatg

SEQ ID NO: 5172 - DNA, 288 bp, Zea mays
  misc_feature: Incyte ID No: 700456486H1
  unsure 231-232, 244, 259, 263-264, 271, 280, 286-287: a, t, c, g, or other
acgagatggtggacgacccgtcgagcgacgcggttggtgtcatggagcgacgcattccgacgggagcttcgtcgtctggaaccagcccgagttcgccgcgcggatgctgcctacctacttcaagcacaacaacttctccagcttcatccgccagctcaacacatacggttttcgcaaaatagacccagagcgctgggaatttgctaatgagtactttgtcaagggacaganngcacctgctgangaatatccacaggtngttnnccatccncagccatanccatcnnc

SEQ ID NO: 5173 - DNA, 271 bp, Zea mays
  misc_feature: Incyte ID No: 700456487H1
aaggcttgttttattttaatggctgatctatgtaatcacagaggccagtatgtacagacaaagtgggaggttttatttcttggtctcttcctccttggataaagtcttgatgatctcctccttcttggcctggaggcgctcttcacggcgcttgcgtgcttccttggtcttagacctgcgggcctcagcctggtcagccaggagcttcttgcgggccttgtctgccttcagcttgtggatgtgttccatgagaatccgcttgtttttgaac

SEQ ID NO: 5174 - DNA, 265 bp, Zea mays
  misc_feature: Incyte ID No: 700456489H1
ggaagctgctgcggcccctgagtttgctgcagtcactgattaccaaggagctgatcagtggggcggtgaccagtggacctctgatgtggctgcaccacctgttgctcctactggtgctgattggggtgctgcacagctccggttcctaccggtgatggctgggatcaaactgtggcccctgttcctgtggatggcactgttcctccagtggtcgctcctactggttgggaatcagcagcccagcccactgcccaaggctgggaat

SEQ ID NO: 5175 - DNA, 267 bp, Zea mays
  misc_feature: Incyte ID No: 700456490H1
ccagatcctgacccgggatgccaagggcatcagccaggagcagatgaatgagttccgggcctccttcaaccactttgaccgggatcactccggcacactgggtcccgaggagttcaaagcctgcctcatcagcttgggttatgatattggcaacgacccccagggagaagcagaatttgcccgcatcatgagcattgtggaccccaaccgcctgggggtagtgacattccaggccttcattgacttcatgtcccgcgagacagccga

SEQ ID NO: 5176 - DNA, 265 bp, Zea mays
  misc_feature: Incyte ID No: 700456491H1
  unsure 200, 209: a, t, c, g, or other
tataaaggtaatgtaaatgtcttatgattaagaacagtgtgatgttccatttgatggcatgctatgcataataacctggcatgcaaatgttgaagcatgttgaaatgcttctattcattgttctaagttggggtcatattgatggtagtccctctttcttcgtatgttcataagatgggtcggcatctttagtgtctcanacgcagggnccacgggatttttcaggtcacttggtcgtggaagggctcttattgcagtcatagtg

SEQ ID NO: 5177 - DNA, 270 bp, Zea mays
  misc_feature: Incyte ID No: 700456494H1
ctttatttctgtactatcgtattattatctgtggtcgcatgttacatttagaatccaatgtagtattaaccgatatccacattgattcaaccatggcccaaactaatctggtacgttgcaacagtcagcatgccccgatcttatcctctgatgcagaaccaacctttcacaatccctcctccgcctcagctagtttcttcatattctttggaaacaacaggttgtgcattcagccttgggtttgactcttcactacgatgtcccttggac

SEQ ID NO: 5178 - DNA, 283 bp, Zea mays
  misc_feature: Incyte ID No: 700456503H1
tcctcgagcaagtaaagttgcttttcctattatacttcattaataacatcttttattattaacctccaaatatagtcaacatgctctagcttaaattttttggttttcttcagcatgctttggtcatctaattgtgttgttttggtcagaatttgtctcaaacaaggatgggcggcaggaggatgatgagttcagaatctgatccatcactaaatgttgaacatcggagcatgaggagggcaccattatcgtcagctgggaacctccctcctatggggaggcc

SEQ ID NO: 5179 - DNA, 173 bp, Zea mays
  misc_feature: Incyte ID No: 700456505H1
  unsure 2, 12, 16, 21, 28, 31, 43, 54, 98, 121, 137, 143, 157, 169, 171: a, t, c, g, or other
gnttatcttggnggcnatctngtcgganatntcgcacgaccanagcatacgtangcagaggacggcaacaagaaactgctcaaccggtttcaagatanagcttggtaagcttctgccgaancttgttactgccttcngtgagnccggtatcaccagngaaccgtaaaancngc

SEQ ID NO: 5180 - DNA, 284 bp, Zea mays
  misc_feature: Incyte ID No: 700456513H1
  unsure 30, 46, 62, 222, 226-228, 232, 269, 273: a, t, c, g, or other
ccgagtctgagctcatctccacgcgccgcngccgccgctcgacgcncaccgcgcaccatggncggaacagactgagaaggctttcctcaagcagcctaaggtgttcctcagctcaaagaaatctggcaagggtaagaagccaggcaagggtggcaatccgattttggaagagcattggccttggtttcaagactccccagggaagcaattgaagggacctantttnnnagantgtccattcactgggaaccgtttctatcagaggcagnattnatgctgggaac

SEQ ID NO: 5181 - DNA, 219 bp, Zea mays
  misc_feature: Incyte ID No: 700456514H1
  unsure 12, 23, 43, 65, 95, 169, 172, 190: a, t, c, g, or other
agctggtgaagnttgctacaganaggggccgcaaagctaggcntaacttgaaggtgggcatttgnggagaacacggtggagagccttcctctgtngccttcttcgcgaaggctgggctggattacgtttctggatcccctttcagggttccgattgctaggctagctgnacnacaggtgcttgtcgaggntgcctccacattggaaaccggttgtctga

SEQ ID NO: 5182 - DNA, 94 bp, Zea mays
  misc_feature: Incyte ID No: 700456516H1
  unsure 2, 41, 47, 49-50, 52-53, 55-56, 78, 91: a, t, c, g, or other
cnaacatggttccatcttagtgtacaatagtggtggttttntttttngnncnncnnaaaccaccactcattgcacaancatgggggttttngtt

SEQ ID NO: 5183 - DNA, 286 bp, Zea mays
  misc_feature: Incyte ID No: 700456520H1
  unsure 170, 208, 216, 239, 245: a, t, c, g, or other
gcttatcttgggggcgatctcgtcggacatgcgcacgacaaagcatacgtagcagaggacggcaacaagaactgctcaaccggtttcaagataatgcttggtaagcttctgccgaagcttgttactgccttctgtgaggccggtatcaccagcgacccgtaaaaccagcncaagttgctctctgctgcatcagcaatataaagaaggntcccaatnccattggctgatgcagcagagancaggcntgcgctgcatcagcaatggaattggggacccttctttatat

SEQ ID NO: 5184 - DNA, 131 bp, Zea mays
  misc_feature: Incyte ID No: 700456522H1
  unsure 25-26, 28, 36, 45, 52, 75, 83: a, t, c, g, or other
gaatcgaagcatcatgcaatgatgnncnattgcctnccttttttnaaacaanggaatcgttgattttatattganaacatatngttgcaatttgtaaaaaagcaaccttgccgaatggatcattattaatt

SEQ ID NO: 5185 - DNA, 286 bp, Zea mays
  misc_feature: Incyte ID No: 700456523H1
  unsure 118, 231, 246, 265: a, t, c, g, or other
tgggcaaccccctcctcgacatctccgccgtcgtcgatgacgccttcctgcacaaagtatgacatcaaagctgaacaatgctattctcgctgaggagaagcacttgcctatgtatgancgagttggctagcaagagcaatgttgaatatattgccggaggagccacccagaacttctatcagggttgcccaatggatgcttcaaactcctggtgcaacaagttacatgggntgcatggaaaggacnagtttggtgaggaaatgangaaaaacgctcaagctgcagg

SEQ ID NO: 5186 - DNA, 285 bp, Zea mays
  misc_feature: Incyte ID No: 700456524H1
  unsure 30, 45, 67, 150, 181, 206, 246, 268: a, t, c, g, or other
tcgggcaaagatgctggtcgcctctcagcngcttggcagctatanaaagctcaggaggagctcatcnaggttgctaaggactttggtgtgaagttaacgatgttccatggacgtggtgggactgttggaaggggtggtggtcccactcancttggccatcttgtcccagccaccagacacnatcgcacggatcactcagggtcacngtgccaaggtgaagtcattgaacagtcatttggtgaggancacttgtgctttaggacactgnaacgtttcacggcttgc

SEQ ID NO: 5187 - DNA, 279 bp, Zea mays
  misc_feature: Incyte ID No: 700456526H1
  unsure 18, 27, 51, 82, 118, 120, 126, 134, 169, 179, 186, 224-225, 235, 261: a, t, c, g, or other
tgactgctcctccgtcangcatcaggntgccctgaaagaactttggaggtnggcttaccctaacagacaacttcctgcctcngaagtgcagatctctggaaggagatgggctggcagnantacganccatccanagattttagagcagctgggttcatgtccttggagngtctaatatnttttgcnagaaattacccagattcctttcacaggctgactgcatnnagcagaggtnagagagctgaagggagtatcctttgncagtaggcggcgtaaaca

SEQ ID NO: 5188 - DNA, 279 bp, Zea mays
  misc_feature: Incyte ID No: 700456527H1
  unsure 113: a, t, c, g, or other
tgactgctcctccgtcaagcatcaggatgccctgaaagaactttggaggttggcttaccctaacagacaacttcctcctctgaagtcagatctctggaaggagatgggctggnagaactctgatccatccacagattttagagcagctgggttcatgtccttggagaatctaatatattttgccagaaattacccagattcctttcacaggctactggcataaagcagatggtaagagagctgatgggagtatcctttggcagtaggcggcgtaaacat

SEQ ID NO: 5189 - DNA, 106 bp, Zea mays
  misc_feature: Incyte ID No: 700456528H1
gcctgctgcatttgtaatatattcgaaatccgtattttttttcttcacaagcactactctatatacgatgaataaaagggcgacaatacagtgtcatcttgtggcc

SEQ ID NO: 5190 - DNA, 279 bp, Zea mays
  misc_feature: Incyte ID No: 700456530H1
gttccaggacttaaggttctcacaccatactcttcagaagatgcccgaggcttgcttaaagctgctattagagatcctgatcctgttattttcttggaaaatgaattgctttatggagaatctttcccagtttctgctgaagtgcttgattctagtttttgcctaccgattggcaaagctaagatagaacgtgggggtaaagatgttaccattactgcatctccaagatggttggctatgctctccaggctggcagagatactgtccaaggaaggaatc

SEQ ID NO: 5191 - DNA, 282 bp, Zea mays
  misc_feature: Incyte ID No: 700456535H1
  unsure 2, 5, 7, 46, 48, 53, 100, 159, 191: a, t, c, g, or other
cngcnanctacgcaacaccagacgctccagcagtcctgcactcggngntcgcncgcccgacggcccaccatgatgcatccccaagaagaaccgcaatganatctgcaagtacctcttcaaggagggcgtgctgtatgccaagaaggactacaacctggncgaagcacccacagattgatgtgcccaacctncaggtgatcaagctcatgcagagcttcaagtccaaggagtatgtacagagagaccttctcctggcagtactactactggtacctcaccagc

SEQ ID NO: 5192 - DNA, 275 bp, Zea mays
  misc_feature: Incyte ID No: 700456545H1
cgccatctacgacgacctccgccgcaaggaccccgaactgtacaagaggaatgggttgctgcctatgctgaagaggaacacctcggtgaagctggcgcctcagcggtggcaggacaatgccggcgacggggtgtttgatatgataatgacctttgaggagagggtctttgacttggttgttgaagatatgaataaccgcgagccgaggttgatgaagtgtgtgctgataataaatatggatgtcaaagataaccatgaagaagctggtgttgggg

SEQ ID NO: 5193 - DNA, 108 bp, Zea mays
  misc_feature: Incyte ID No: 700456547H1
  unsure 25, 46, 80, 85, 91, 95, 104, 107: a, t, c, g, or other
cgttcttgcagtagtccacttgacncaccacttctattgtcctggnctgctaatgctaactcctccagtttctcattccngacancttggngttngacaggggnggna

SEQ ID NO: 5194 - DNA, 274 bp, Zea mays
  misc_feature: Incyte ID No: 700456550H1
  unsure 8, 14, 19, 37, 49, 60-61, 88, 93, 126, 189, 210, 230, 234-235, 237, 261,270: a, t, c, g, or other
aagacgtnagccancaggngttcgtcagagctctggnagccttcctcanaaagtccgggnngctgaaagtccccgaatgggtggatancgtcnaagctggccaagcacaaagagcttgctccctangatggagaactggttctacacgcgagctgctttcacagcgctgcacctgtacctccggggtgncgcggggttggatccatgcancaagatctatgggggacgtnagannancggcgtcatgcccagccacttcanccgaggctncaag

SEQ ID NO: 5195 - DNA, 281 bp, Zea mays
  misc_feature: Incyte ID No: 700456553H1
  unsure 145, 174: a, t, c, g, or other
ctgatcttcagggtgacgaggatcagggcttacaggaaaatcaggctccgtgctgaagatgtgcaaggcaggaatgtgctcacaaacttctggggcatgaattttaccaccgataagctcagatctctagtaaagaagtggcagncattgattgaagcccatgttgatgtcaanacaaccgacaactacatgctgcgtttgttctgacattggttttaccaagaggcgcccaaaccaggtcaagagaacctgctatgctcaggcatcccagattcggccag

SEQ ID NO: 5196 - DNA, 278 bp, Zea mays
  misc_feature: Incyte ID No: 700456555H1
  unsure 40, 217, 254: a, t, c, g, or other
agcaagtatgattgcctctaagtcttttcaaccagaagangtgaaacccatagcctgggcagttgctacaaaacacgagggcgatgccagtgaagaagcttctctcaccgatgaggcacctacatcagaagtcatgctagcccggaagagaaaagcaggaagctctttgtcgatagagccaaaccatctctctgatgaacttgaaccaaagctggangatgcttagaacggggagacgtctacctgataagtanaagttagcagcatcgtggatgcca

SEQ ID NO: 5197 - DNA, 272 bp, Zea mays
  misc_feature: Incyte ID No: 700456558H1
  unsure 189: a, t, c, g, or other
gacaagtgagccccactactcccaagggatgctgaattttgattataagggcaaagattttagatctcaggttcaattcggaaacaatggtttctatggagcaaactacatccagagtgtcagcaagaacctttccttgggaactgaagccttttggcttgggcagcaaaggaagtctggagtcggtgntgttgctcgctatgacacaaagaaaatggttgcgactggcacaaatggcaaccactggaaggtcgcgcttagttagtacagaa

SEQ ID NO: 5198 - DNA, 275 bp, Zea mays
  misc_feature: Incyte ID No: 700456559H1
ccgcacgagaccttggcaaagcatcttttccactgggagacaaatccgttgagttgggcaatgaggacgagggctgcattttatgtggcacaggcgttggaatactgcagtagcaaagggagggcactctatcatgacctgcatgcatacagggtcgtcttcgatgcggaaggtaacccaagactatcatgttttggtctgatgaagaacagccgtgatggaaagagctacagtactaatttggccttcacgcctcctggagtatcttaagacag

SEQ ID NO: 5199 - DNA, 160 bp, Zea mays
  misc_feature: Incyte ID No: 700456562H1
  unsure 24, 27-28, 48, 82, 85, 90, 106, 108, 110, 122, 135, 153: a, t, c, g, or other
gcggtccctccgggtctgtctctngcnncaacagtgtttggagcgaancagatccggggactctcttccagcctccgaccgnccnccganttcctctccgcttgcnancnccgggaccagcntctcggccagctnctgcttctgggacctgcnagcaccg

SEQ ID NO: 5200 - DNA, 80 bp, Zea mays
  misc_feature: Incyte ID No: 700456563H1
  unsure 2, 4, 6, 8, 62, 67, 73, 79: a, t, c, g, or other
gncntngncgcatcgtccatgcattcgagcagaggggagagagagagcagagcggaggaganaggtnaaagcnttgcant

SEQ ID NO: 5201 - DNA, 278 bp, Zea mays
  misc_feature: Incyte ID No: 700456566H1
cagtcacagtctgaaatgccagagcaatcagaaccatctagcatggcttcagacgcagcctctgacattgcctccggaggacggtgcttcaacgacagcaccatctgagttggatgaggtgaactcgctgtctgatagcgtatccaatttgacaacggatgatgctacttcaaacgccccatccactgaaaacggaaatggtgtggcagggtcctgatggttatagttatgcagacccagttctttttcccacacacagtgctgctttttttatacag

SEQ ID NO: 5202 - DNA, 281 bp, Zea mays
  misc_feature: Incyte ID No: 700456567H1
  unsure 2, 5, 23, 37, 46, 48, 53, 55, 59, 87, 95, 104, 113, 136, 163, 166, 186,191, 227, 240, 272, 274: a, t, c, g, or other
cngcnacctacgcaacaccagangctccagcagtccngcactcggngntcgcncncccnacggccacaccatgatcatccccaagangaaccgcnatgagatcngcaagtacntgcttcaaggagggcgtgctgtntgccaagaaggactacaacctggcgangancccacagattgatgtgcccnacctncaggtgatcaagctcatgcagagcttcaagtccaangagtagttcaganagaccttctcctggcaggatactactggtaancncaccaac

SEQ ID NO: 5203 - DNA, 272 bp, Zea mays
  misc_feature: Incyte ID No: 700456568H1
agcgttaccctatgaatgatgcagcgggaacaataaatgaaattggggcaacaatccgaagggtgatgggtggaacaagtggaatcttgtatgccatactctgcaaggctgcgtatgcaagcttaaagcagagctcaactgtcactgcgaataaatgggctgatgctttagaggcctccattgctgctgttagcaaatatggtggtgccagcgcaggataccgcacaatgttggatgccctattcctgctctgctgttctgaaacagagact

SEQ ID NO: 5204 - DNA, 219 bp, Zea mays
  misc_feature: Incyte ID No: 700456571H1
  unsure 104, 126, 134, 144: a, t, c, g, or other
tgaaggagggcacggcgaactgcatcgacatcctcatcgccatcatcctcccgcctctcggcgtcttcctcaagttcggctgcaaggtcgaattctggctctgnctcctgctcaccttcctacgcntatctccncgggatcatntacgcgatatacgttatcaccaaggactagccagctagcgccgtaaaccggggacaaggtgcagagagctagctg

SEQ ID NO: 5205 - DNA, 271 bp, Zea mays
  misc_feature: Incyte ID No: 700456575H1
  unsure 238, 253: a, t, c, g, or other
aattaaaggaggctgagaaagagcattcagaaggagtcagaaaggatagagaaggaacttggctgaaatggaggaaatgaggaaaaagatcagtacaatgacagcagatgattactttgagaagtaccctgaactcaggaagaagtttgacgatgaaatccgtaacgataactggggatattgaagagattggagagaactcttatgatgccattccatgtccgtgaagaaccaatantttcctgtgcctgantgggtggtttccatagca

SEQ ID NO: 5206 - DNA, 224 bp, Zea mays
  misc_feature: Incyte ID No: 700456578H1
gtgagagagacaaagcagtgcaggatctggctcggctgaagcagcatttgttagataaggatcttgaagaccaagaaaagatggatgaagatagtaaactcattgaagagttgcgggtagtatgcgagcagcaaagggctcatataatgcagttagagagggcttaaaggtcgagatggcaaagcaggaggagaacaaaaaggtcataagtgaagagcaccaga

SEQ ID NO: 5207 - DNA, 272 bp, Zea mays
  misc_feature: Incyte ID No: 700456584H1
cgattgcatcacaggaacttggttaagctgataggtatatgcacagaggggcatagccgatgtttggtatatgagcttgttccaaatggcagtgtggaatctcacttgcatggatcagataagggagccgctcggtttgactgggacgctaggctcaaaatcgcactaggtgcagcacgtggacttgcatatttgcatgaagattcaagcccacgtgtcatacaccgcgattcaagtccagcaacatcttactggaacatggacttcacccc

SEQ ID NO: 5208 - DNA, 273 bp, Zea mays
  misc_feature: Incyte ID No: 700456585H1
  unsure 34: a, t, c, g, or other
acaagcggtacttctgaagtcatccaatgtgttngatcactggataaactcagcaactgaaagtctagttagctttgttcaccaggagatggatgcatatcgtctttacacggttgtgccatatttggtaaaatacattgactatcttactaacatatatgtgcgcttgaaccgcaaacggttcaaaggacgtactggagaagaagactgcagaatttctctctcaacactctaccatgttctcgtaacaacttgcgtggtgatggctccatt

SEQ ID NO: 5209 - DNA, 199 bp, Zea mays
  misc_feature: Incyte ID No: 700456593H1
  unsure 2, 14, 21, 31, 34, 39, 100, 112, 115, 131, 164, 174, 176: a, t, c, g, or other
cncaggacatgaantgtgtgnggatgcagtngcntgaanccattccgccgtctccgttctgcaggatttgctccagatcgaaatatctatataacatttnttcctgaccganganattggtgggcatggcngtgttgaaccatttgtttcatccaaggagttcnaagatatgancnggcattagtccttgatgaagggc

SEQ ID NO: 5210 - DNA, 143 bp, Zea mays
  misc_feature: Incyte ID No: 700456602H1
  unsure 45-46, 51-52, 55-56: a, t, c, g, or other
cttgctccaggagaagtatgaagcagcaatgacagcactttcacnnatggnngannagagctctgaatggcagaaacaatgctggaagctacaaagcaataccaggttgggcaggttaaagccaaccaatctttcacttcaag

SEQ ID NO: 5211 - DNA, 280 bp, Zea mays
  misc_feature: Incyte ID No: 700456606H1
  unsure 30, 70, 172, 201: a, t, c, g, or other
gctagggtttatccaccggcggcgcgcgcnacggcggcaagatggtgcagcgtctgacctaccgcaagcngcacagctatgccacgaagtccaaccagacgcgggtcgtcaagacccctggtggcaagctcgtgtaccagtacaccaagaagagagccagcgggcccaagtntcccgtgaccgggaagaagatccagggcnttccccatctgaggccagctgagtacaaaaggtccaggttgtctaggaaccgcagaactgtgaaccgtccctatggggg

SEQ ID NO: 5212 - DNA, 277 bp, Zea mays
  misc_feature: Incyte ID No: 700456607H1
  unsure 18: a, t, c, g, or other
ttcggttccgaagaaganaagaaccgtcaatctgaccctgcatcaccaaatcaggtccaaaagaagaagatctgggaagctgttcagcctcatcttagaacaacagataactgcattgcggttcttggtgataaacaaatgcgtacctctgcaggcctagttttctgcaaatcgcttcagggtgcaagagtgtcataaatctttatggccaacatctttcttgtatcatggaatcgtgtgtcatgtatcttccctgcaaataataactaactatatg

SEQ ID NO: 5213 - DNA, 281 bp, Zea mays
  misc_feature: Incyte ID No: 700456608H1
  unsure 67, 86, 118, 124, 137, 147, 173, 179, 196, 277, 279: a, t, c, g, or other
gcaactgccagaaaggataaggcatatgaatcgttgcaagaattgagagcagtgcgtgatgcaaaanacgcatcctccatgcatanccgtacagttttaaccagagctagggattatncttcanggaatatgctgancagattttcnagagtccaacaaaactgaggtcgacnagttcntgaccccaatggtgtgnaaattaaggctttcagagaggactacgagaagagaatcctcacatccctaaatagccgacagctgactcgagatggtcggntnag

SEQ ID NO: 5214 - DNA, 276 bp, Zea mays
  misc_feature: Incyte ID No: 700456610H1
  unsure 129: a, t, c, g, or other
acggcgggtgccccatcgttgtcacagccagtctactccggcggcccagcccacgtacagttcgagcaggcgatctcgcacccctggtcgcctggtcagcagtgagcagtcagcggctgcgcgccgccncgtcgggactcgggggcagagctggggctatctcttgagctggtggtcaggtactcagggcgtcatccatgatccatcctgattctccctcgtcctgctcccctttccttggccggccggcgcgcggagtggaggtcgaccgacatt

SEQ ID NO: 5215 - DNA, 274 bp, Zea mays
  misc_feature: Incyte ID No: 700456612H1
gcaggatcatcgaggacgcggtcgtggttccctcgcctcccaggaggtcccgccggcttgccaatgtccctgaggtcaagtacgcagagatagcaccacaccgtgcagatagaatgacaaggtctcctagaagaccagctgacctcatctacttggcaagacgcggatcaatttccatgaaagctaggctggaggcaacaaggaaggctgaggagctagaatcacaactcgatcctgaaatcccatccttcgtgaaggcgatgttgcattcgca

SEQ ID NO: 5216 - DNA, 275 bp, Zea mays
  misc_feature: Incyte ID No: 700456614H1
  unsure 50-51, 137, 240: a, t, c, g, or other
tcgagagcaagggagcgcggtgacgtcatcgttttccaaggtttctcganncggctgctatggcgaccagggcggcgtcgatattcctgcagcgcagcttcctgtcttccggcggcaaggtcctcagcgaggagganaaggccgcggagaaagtgtacatcaagaaaatggaacaagagaagctggagaagctcgcacgcaagggccccagctcaggagagcaaccttcgtcgactacantctctgcagcaagtgatgtgaagactggggctggg

SEQ ID NO: 5217 - DNA, 273 bp, Zea mays
  misc_feature: Incyte ID No: 700456616H1
  unsure 39, 54, 265: a, t, c, g, or other
ggaactctggttccccaaacttccctcaacaaggaaccnagtccacaggttttnagcatcatcaataccctttgctcagatagtagaaacatcgtttttcttgtcagtggtcgagacaaagataccttgggaaagtggttctcctcatgtccaagattggggattgcagctgaacatggttacttcttgaggtggtctagagaagaagagtggcaaacatgcactcaggcattggacttcggatggatgcaaatggcgaacagtngatgaatt

SEQ ID NO: 5218 - DNA, 184 bp, Zea mays
  misc_feature: Incyte ID No: 700456617H1
  unsure 67, 74, 98, 106, 122, 129: a, t, c, g, or other
ggcgggagtgttacttcggttcccaggtttgaagattatctcacccggccccagctatataagctgnaccggtntggaggggcccagcagggccaacnccagggantccttccacgacaganaaacatncaagactccttcagccaacatgatggtactgaaagtagaggaactggtcactggt

SEQ ID NO: 5219 - DNA, 81 bp, Zea mays
  misc_feature: Incyte ID No: 700456619H1
  unsure 3, 33, 66, 73-74: a, t, c, g, or other
ctnctttactgcccgagagtgctgactagccanatccagtcaagcagtaaaggcggcaccatggangctgcgnnggagaat

SEQ ID NO: 5220 - DNA, 275 bp, Zea mays
  misc_feature: Incyte ID No: 700456623H1
  unsure 51, 149, 158: a, t, c, g, or other
agatattccgagattatgaagaatacctgaagaggctaaacctttatcgtncaaagagtttggacatgtcaatatatctggaaaatctaatttaacttttgaagaagctttggtatctgagcacaaagcgatggagaaggctcaaaatntgccaactnagctaatggctcaagttcttcggatgactcaatacagccctcttggtttatatgaacttgttgataagatatatgcgagtctgctggaagaagtatttgagggaatagaattacatt

SEQ ID NO: 5221 - DNA, 89 bp, Zea mays
  misc_feature: Incyte ID No: 700456626H1
  unsure 6, 47, 60: a, t, c, g, or other
ctgtgnatggaggctgcttgaattgcatgtagcacccaccgttggcnaactatgaggtgnattttggatccttgcagtaagaatctcag

SEQ ID NO: 5222 - DNA, 271 bp, Zea mays
  misc_feature: Incyte ID No: 700456627H1
  unsure 37, 117: a, t, c, g, or other
gaaaattcaacgcattcagctaaaaatttaccctcanctggacctgacgaacgggtatatccccattttgttgaacataacaaaaattcattttctgcatcagccaagaaagataangggaaaggcaaattgcccgttggagattctggatgcagcatgaggtcaccgttgttagattgtaacctgtgtggagctacagtcaggatgcgggactttagacctgtattatgtccttctcgtttcagtccaaataacattgttgtgcctggaa

SEQ ID NO: 5223 - DNA, 103 bp, Zea mays
  misc_feature: Incyte ID No: 700456629H1
  unsure 86: a, t, c, g, or other
gctagggtttatccacccggccggcgcgcgcggatcggcggcacagatggtgcagcgtctgatcctaacccgcaagcggcaacagnctatggccaacgaaatt

SEQ ID NO: 5224 - DNA, 270 bp, Zea mays
  misc_feature: Incyte ID No: 700456630H1
  unsure 232, 236, 242, 244-246, 249, 253, 256, 260, 265, 268: a, t, c, g, or other
gcgcaatggcatcacgccgacgagcgagctcaccatcctcgagcacgacggtgactcctacgtggcggagattgacggcaaggtcattgtaaagatcgggtccaggtacgacgtcggccatctcatcccggcgggttttgaggtcgccgcccacggcaacgactacgccgtctgggagaaagccggcgccgaacaagtgactcgagcataatagagtgctcgagattacgantttnatcctnannncantgtncangggnctgcnttnat

SEQ ID NO: 5225 - DNA, 226 bp, Zea mays
  misc_feature: Incyte ID No: 700456633H1
  unsure 55, 84, 87, 95, 101, 138, 145, 194, 221: a, t, c, g, or other
gattagttgatttcttgaagggactccttgaatttgatccaaataagcgatggtnaccattgcatgcgctacaccatccattcntancaggagantcgttnactggtccatatgagccaatacccgagactgcaaganttcctgntgctcgtgcagcagcaattgatcacaatcctggaggggggcactggctncattcaggtctttccccgcagttggantttta

SEQ ID NO: 5226 - DNA, 274 bp, Zea mays
  misc_feature: Incyte ID No: 700456634H1
  unsure 62, 119, 122-124, 149, 156, 159, 167-168, 172, 176-178, 184: a, t, c, g, or other
catttccaaacacattttctggattctcaagtggccagccgtgcattagtccattgactcgncagtgtgcggcttctactgcaccggctaactcgcaaacaacttggacaatgcgtgcnacnnncccggaatatggggttgtctcttantacaatngtnggatcggnncttngcannnatttgncaggtgtcggaattgcctgccttccattgggacttatattctcatttgttcggcgtccagaagctgtaattacacgctcacaatatataa

SEQ ID NO: 5227 - DNA, 275 bp, Zea mays
  misc_feature: Incyte ID No: 700456636H1
  unsure 6, 10, 82, 90, 108, 146, 234: a, t, c, g, or other
gcagcncttncggtcgtccctcagccgcgtcgcaccgcatcgcattctacgattcgaagctctctgctcgcaggggaccatngcgaagangctacccaaccgtgagcnccgagtacagcgaggccgtcgagaaggccaggcgcaantccgcgccctcatcgccgagaagagctgcgcacccctcatgctccgcctcgcgtggcactccgcggggacgttcgacgtgtcgtcgantgaccggcggtcccttcggtaccatgaagtgcccggcggaa

SEQ ID NO: 5228 - DNA, 265 bp, Zea mays
  misc_feature: Incyte ID No: 700456637H1
  unsure 7, 26, 39, 53-54, 62, 78, 81, 87, 90-91, 112, 125, 158, 210, 263: a, t, c, g, or other
ttcttcnacctcccatcccgtgcagncggcctcaccgcnggcgacggtcacgnngagacccnggctgccggtaccgtnagncgtgcnccnncctctcttcgtcgcccccgcnaaaaccttcatcngccggggctgcaccggcggcgcggggacaacanaagctcgagatccggttactgatctcttcggtcctcggttcacgttgatatnccaacaaaggtcacattgctagactccagattggttcctaacaatgaaggcanat

SEQ ID NO: 5229 - DNA, 276 bp, Zea mays
  misc_feature: Incyte ID No: 700456639H1
  unsure 66, 184: a, t, c, g, or other
cagcgcaagcccttccctgacagcggcggcgacatggtgctcgaggcgacgatgatctgcatagancaacttcggagtggatgcggaacggcgactacgccccgtacgcggttccaggcgcaggccgatgccgtcaacctcatatgcggtgccaagacccagtcgaacccggagaacacagtangcgtgatgacgatggccgggaagggcgtccgcgtgcttgttcactcccaccagcgacctcgggaagattctcgcctgtatgcacgggttgga

SEQ ID NO: 5230 - DNA, 127 bp, Zea mays
  misc_feature: Incyte ID No: 700456640H1
  unsure 45, 49, 69, 97: a, t, c, g, or other
gcaggagtgtctgcatgggtcctgagagtcgcgtgagcagcgaanagtntcacggatggttggatgganggcaatgaccagctgctgagctgctgcngcttcctcctggttcgaccatcagtttgta

SEQ ID NO: 5231 - DNA, 252 bp, Zea mays
  misc_feature: Incyte ID No: 700456642H1
  unsure 26, 46, 52-53, 58-59, 77, 141, 200, 203: a, t, c, g, or other
agggcgatggcgcaaactagcctgcntcctggagttcgtttccacncaactnntgtanngattgtttcctactattngaagaggaagattatgggaaagaagcttattgtagacgctatatcagaggttgatctctacaantttcctccctgggatctccctgaaaagtcctctcttcgaagcaaagatcttgaatggtnctncttttgtcctcgtgacaagaagtaccctaatgggtctaggacaaaccgt

SEQ ID NO: 5232 - DNA, 279 bp, Zea mays
  misc_feature: Incyte ID No: 700456646H1
  unsure 59, 98, 119, 139, 189, 197, 204: a, t, c, g, or other
gggagaacatggaggacctcggcatggaccccgatgaggccctcgctgacgccgttgangcgctcaccctccagggcgccgattctctcaggtatcgntaagcgcgtgccgggagaggncaccgcggcggatgtgagcnccggtgtgcggggttctgggaacgaacttgaaaggccttctcttcagcgnccaacggncggtgtncggagcaggatctcgacggactcgtctctctgctcgatgagttgcgcaatctgtgctgctccggcgagggttcgg

SEQ ID NO: 5233 - DNA, 82 bp, Zea mays
  misc_feature: Incyte ID No: 700456650H1
  unsure 50, 52, 57: a, t, c, g, or other
catgctaaacctctagttatctacgcataatggtggctagtggtgactancncaganctggcactgaacccaaggcttatga

SEQ ID NO: 5234 - DNA, 272 bp, Zea mays
  misc_feature: Incyte ID No: 700456652H1
  unsure 124, 185: a, t, c, g, or other
ggggacatgagcggcgcccgcgagtgtgaaggtctggcacgcatcatcgacttcgatgttcaagcagggtggcgaataccgcaacagtatctgctgtgtcggcaacatctacaccttcgaccanacagaggagtcgcccgttggtccgatgagatttaccaacagaccctggcaagacaagatgnttgtgaattgtgcgtcgataaacatcctatctgtcaagattgcatgctcggatatcgacttccccatccaagtctatggcaccgttg

SEQ ID NO: 5235 - DNA, 265 bp, Zea mays
  misc_feature: Incyte ID No: 700456653H1
  unsure 14, 36, 54, 202, 219, 227, 231, 240: a, t, c, g, or other
aatcgcggagcaancatccaagtcgactgtttccantcctgatgatgcaacgancggtgaaagaagcgcccgcttcaggcacggaagctaagtatcgactcgtcgctcacaagtgaagaaagggagctgaagcggaagcaagcccgcgtcagagccacgttcgtgcaggacctgctgctctctactctatttcggcgatgangacgaaccagagcgagnctaagctnttanccactggangggtggaggtcccacgaggaccagc

SEQ ID NO: 5236 - DNA, 268 bp, Zea mays
  misc_feature: Incyte ID No: 700456654H1
  unsure 81: a, t, c, g, or other
gcttttattgttgaatatgggaaagacagggatgttgaactaggttttcatgttgatgattcagaagttacattaaatgtntgccttggaaaacaattctttggtggtgaattatactttcgaggtattcggtgtgagaatcatgtgaattcagagacacaacatgaggaaatgtatgactacacacatattcctggttgggctgtactccaccatggtcgacacaggcatggtgctcgagctacttcatctggtctcagaataaatc

SEQ ID NO: 5237 - DNA, 271 bp, Zea mays
  misc_feature: Incyte ID No: 700456655H1
  unsure 47, 69, 105, 175, 216, 225, 231: a, t, c, g, or other
gcttcacgccggcaaccgctaccgcctcgtccgccgcgctccgcggncacatctccgcctccgcgcgcncgctgccacggcctcgtcctccttcatggcggggangagaagacacggtactgcaccgatcacctcgagctcttcaggcaggagagctacttcgcctatctctttngagtgcaggaaccagggttctacggcgcaattgacatcgcntctggacantcaatnttgttcgctccaagattgccagctgactatgctgtttgga

SEQ ID NO: 5238 - DNA, 269 bp, Zea mays
  misc_feature: Incyte ID No: 700456656H1
  unsure 22, 47, 68, 180, 227, 244: a, t, c, g, or other
ttgtctgctgcctgctcgtganatctattctgatgggtcataccgtncaggacgtagctatgatggcnctgtgtgggatatttatttggacgctgatcgaatacactttgcaccgcttcctgttccacatcgagaccaagacctactggtggaacaccgcacattaccttcttcacgggngccaccataagcaccccatggactcgctcaggcttgtgtttcctccnactgcaacagcaatttngtgtttcccgttctggaacctggtc

SEQ ID NO: 5239 - DNA, 214 bp, Zea mays
  misc_feature: Incyte ID No: 700456657H1
  unsure 60, 166: a, t, c, g, or other
ggcatgcgtcagaccttccagagctgccccattgccagaagagcaaagatcaacaccagngcccaggggcagcagcagtagcgtggcgaaggggtcaccaccaccagccttccagttccagtgcagggcgtcgactttcgcggcggacaccagcctccggctcganctggacgagaaccccgaggcgatcatctcgggggcgtggcccgggaat

SEQ ID NO: 5240 - DNA, 266 bp, Zea mays
  misc_feature: Incyte ID No: 700456659H1
  unsure 117-134: a, t, c, g, or other
ctcagctcagctcagctcagctcatctgctcacacctcacacccacaggccggccgccacagcaccgcggatagcagagcagagcggtgagctgcagagcagggcagccgaggtcgnnnnnnnnnnnnnnnnnnagccatgagcaaggacaagcaccacaagcacgagcaccacctgcggcgttgctgcgggtgcatggcgtcgtgcctcctggcgctggtcctcatcgtggccttcgtctcgctggtggtgtacctggcgctgcg

SEQ ID NO: 5241 - DNA, 264 bp, Zea mays
  misc_feature: Incyte ID No: 700456660H1
gccttctgcgaactgtctctacccttacgaaggaagaggcagccttctcaccgtcgcacccggcgatgcagcggcacgtcgcctccggccggccgtcgggcacggacggctccgacttttcttaccgcatggtcgtcgaatcccggtaccagagggtcgccgagggcagatcccgcctcgcgcgcctcatcctcgtgcaggcgctgcacctagtggccggaggttgcttctattgctgtcgttgtccaagggggcggcggtgaa

SEQ ID NO: 5242 - DNA, 270 bp, Zea mays
  misc_feature: Incyte ID No: 700456662H1
  unsure 39, 42, 66, 116, 148, 179, 191, 203: a, t, c, g, or other
gccaagggtgtggagaagggattccctcttctttccctnctnagcagcatcctcccagtctacaangaggtcattgctgagttgaaggcagctggggctttcatggattcagtttngatgagcccactcttgtcctcgaccttgaatnctgaacaaattggctgcattctctgctggcntacgcagaactngaatctgtactntctggattgaatgtgcttgttgagacttactttgctgatgttcctgctgagtcctacaagaccctaa

SEQ ID NO: 5243 - DNA, 266 bp, Zea mays
  misc_feature: Incyte ID No: 700456663H1
gcggcgggtactacggcggcggtggcatcgcgacgccggggtacgctccggcggtcccgtacgggatgtcgcaggtgaacatcgagggcaacgggtgcgggcgggcgctgccgccgcagccgaccgtgaaggtgtactgccgcgccaaccccaactacgccatgagcgtccgcgacgggaaggtggtgctggcgccggcgaaccccaaggacgagtaccagcactggatcaaggacatgcggtggagcacgagcatcaaggacgag

SEQ ID NO: 5244 - DNA, 270 bp, Zea mays
  misc_feature: Incyte ID No: 700456668H1
  unsure 78, 198, 215, 219, 224, 244: a, t, c, g, or other
caagttttactgactatgtattttcaggtttattcaatttcggttgctaatgcttctgacagcagttgtatcagtccncttgttcagcttacatgtatccctcgcatccttccttggatccacataagtgttaataataattttgttgcatctcctctgctgatcagagctttcaaactcatgacagaataatgtacnaaacttcagtttggtgnctanctcantgtacctacactcagttggnaaacttcaaccacactgcaacaaggt

SEQ ID NO: 5245 - DNA, 245 bp, Zea mays
  misc_feature: Incyte ID No: 700456669H1
  unsure 99: a, t, c, g, or other
atgtttggcctgcagtctgtgctgctatggactatatggatcagtttgaccgtgatggtgatggtctcattgagaatgatggatttcctgatcaaaccnatgatgcttggactgttcatggaatcagtgcttactgtggttgtctttggcttgctgcacttcaagctgcagctacaatggctcatcgccttggggatcggcactttgctgagaagtacaagctcaagtttataaaagccaaagca

SEQ ID NO: 5246 - DNA, 270 bp, Zea mays
  misc_feature: Incyte ID No: 700456674H1
  unsure 7, 9, 34, 60, 65, 71, 93, 108, 135, 144, 162, 166, 169, 215, 222, 239,255: a, t, c, g, or other
gtctgcntnccagagacccagccatggcgatctnccagatctcacgcatagtcctgggcnatccntctccnggccgccgccttcgccgccgcnccagctgcgcttgcngaacggcgacgacgtggtggcccttancgaatccangttcgagaaggaggtcgnaaangancgcggcgccctcgtcgagttctacgccccctggtgtggtcactgcnagaagcntagctcctgagtatganagacttggtgcaagtnttaagaaagctaaat

SEQ ID NO: 5247 - DNA, 262 bp, Zea mays
  misc_feature: Incyte ID No: 700456675H1
  unsure 39, 62, 65, 72, 81, 84, 183: a, t, c, g, or other
tccgatccgaccatggcggcagacgcacttcggggcctnctccccggcgtttacgcgtgctnatngtaatcnccgtcacangcnccgcctccagcgacgcgtcctcggtggtcgtcggcctcgccaaatgcgccgactgcaccaggaagaacttgaaggccgaggcggcattcaagggtcttncggtggcgatcaagtgcaagaacagcaaaggcgagtacgagagcaaggccatgggcaagcttgatggcttcggcgcctt

SEQ ID NO: 5248 - DNA, 263 bp, Zea mays
  misc_feature: Incyte ID No: 700456676H1
  unsure 18, 106, 257: a, t, c, g, or other
gctctcctgctccccgcncgggccgcgccgccgacgccggcgatgcttcggcagcgtgcggtttctgcctccgcgtgtgcgtcgcaggtctgccgccccctattcngtgccgccagttgcatctcctgtggggtccacggaagcgttcggcggcacctcacagtggcggtggcggcggccccgccctcgccttcgtcctcaccttcgtcgggaccgctctacccgacgcctccacccaccgagcaggaggtggaganggtcaa

SEQ ID NO: 5249 - DNA, 259 bp, Zea mays
  misc_feature: Incyte ID No: 700456677H1
  unsure 46-48, 91, 94, 138, 144, 146, 149, 160, 177, 203, 208, 218, 231, 242,249: a, t, c, g, or other
tcaaaactagaagatgctgccacctgttcaaagatgacaataaagnnnaaagaaggtggtgtgctaaaaatggaaggtgcaaatgaagganggnaaggtgtactatctattgttgctgaatcttggaagtactcctgnttccancntgnagagattaagnaaaataatggggatacnctagaatatgaaaatttgtttaagcnggacntgaaaccagngcttaaggccttngtttgggcagncagggtnagagtaaggc

SEQ ID NO: 5250 - DNA, 265 bp, Zea mays
  misc_feature: Incyte ID No: 700456678H1
  unsure 144, 155-156, 166, 168, 174, 193, 201, 203, 212, 222: a, t, c, g, or other
caggaatatccagaagatcacaaaggctatgaagatggttgcagcatcaaagctccgggcagttcagacaaggactgaaaattcacgtgggcttgtggcaaccgttcaccgcccttcttggggatgctcctagtggtgacgtcnagaagaatgtnnttgtgggcantnacctcngattaagggcttctgtggnggatttantncaccatcanggaaagttancagggcccttcacaaattgacatctggtccagaaaaagaaacc

SEQ ID NO: 5251 - DNA, 265 bp, Zea mays
  misc_feature: Incyte ID No: 700456679H1
  unsure 173: a, t, c, g, or other
cagcgagccagcgaccggcaacagttttctcggaaggcagcctcttcctcgtccgccgccgacgtcacccgccgcggctgtcggggatgccggtcagggtggtcgataccgccacgccttcctcgcagccctccccagggcaagaagcaaatactggacacccatctcctccnagatgttcactcttaagtgctggaagatcttttgctggaactcagaatgtttcaagtctgcagaaggatgaagcatggaaagtgaatgtccg

SEQ ID NO: 5252 - DNA, 152 bp, Zea mays
  misc_feature: Incyte ID No: 700456680H1
  unsure 46, 141: a, t, c, g, or other
cttagctgtgtgatctgacgcagagtcccctgtgctgactctgtgncatggatggtccattttatcttgtggtattatcagcctttacataactgctatgtttggatatgttcaattctgttgcaattttatgtggttgtntttttgcgttt

SEQ ID NO: 5253 - DNA, 262 bp, Zea mays
  misc_feature: Incyte ID No: 700456683H1
  unsure 25, 72, 102, 164, 245: a, t, c, g, or other
cggcggcgaggaggctctaggggcnccagcgatgtggtggtccgtggggactgggaggggagggcggcgatngaggagaaggcgtcgtcgccgctggttccnccgccgtcggagatcgacctcgaggcgggcggcggcggggagcagctccagtgccggatctncctcgagaccgacgggagggacttcatcgcgccctgcaagtgcaaggggacgtccaagtacgtgcaccgcgactgcctcgncaactggagggcggtga

SEQ ID NO: 5254 - DNA, 268 bp, Zea mays
  misc_feature: Incyte ID No: 700456684H1
  unsure 5, 20, 42, 53-54, 77, 106, 109, 129, 135, 168, 179, 181, 187, 208, 215,221, 249, 257: a, t, c, g, or other
attgnagctcagctccgtgnggctcttgagacaatagcacanaaagaaggtgnngctaaagaattgtgtaagaagcnggatgcccttgaaattgagttgggatatnatnaggagcaggcaactgaagcngccgcngctgaagagaatcataaggttaaatttgatgangcttcacagangnataaanatcttggaggaacaacttgcngagacanagagcnagttggagcatttccttatagagaaggnaagcttgnctcacacaaat

SEQ ID NO: 5255 - DNA, 265 bp, Zea mays
  misc_feature: Incyte ID No: 700456686H1
  unsure 97, 140, 142, 146: a, t, c, g, or other
cggggacaacgcgcacaccgtcaagcgccggctgcagctcgcgttcaacatgcccaccggcgggacctcgctcaccttcggcgatcgcgtcctgganaacgacctctccttcttacgcccggactcgccgctactgctcncncggnacagcatcaaccggagctgctccaccccgtgcctctgctccgtctccaaggacttcgagcacaaggactgcagcggactggttgagatgctcggctgctccagcagctgtgcccgggtg

SEQ ID NO: 5256 - DNA, 265 bp, Zea mays
  misc_feature: Incyte ID No: 700456688H1
  unsure 86: a, t, c, g, or other
cctatctggtataggacggagctgagcttctagcaacgtacagtgtatccgccatgagtcctttcggggcggtgatcacgccaganaccctcaagtacatgtccaagtaccagggacgtgagatcacgcaggtggactgcgcacgggaggcgatgaggctgatccacgcggaagacaagaacctcaaggccgaggactcagcgtgggagctgaagaagaagttcggcaacggcgtgagcaccatggtcctcgtctacaacgccac

SEQ ID NO: 5257 - DNA, 261 bp, Zea mays
  misc_feature: Incyte ID No: 700456691H1
ccgtgtttggttgaataataaattgacgaaagagggccaagtatagcttagagagagaagctagctagctgaaatggaggctagcagccgccgccgcgtctctcttgtgccactgctggtggtgatcatcgggtgctgtgcctgccgcgcccagatcccgatcccggcgaggacggacgggttcgtgtacggcgggaagccgccggcgtggggcgagacggtggtggtagaggcgttcttggacccagtgtgccccgacag

SEQ ID NO: 5258 - DNA, 127 bp, Zea mays
  misc_feature: Incyte ID No: 700456692H1
  unsure 17, 36, 51: a, t, c, g, or other
gtccaggcattagatgngaattttatgttacattancggacaaaagaatangttcgtttatcttctggatgacttgcaattttggactggattgcattcaattgcagatttgctttgcttttacact

SEQ ID NO: 5259 - DNA, 137 bp, Zea mays
  misc_feature: Incyte ID No: 700456694H1
  unsure 24, 33, 93, 116: a, t, c, g, or other
gccgcgcagagggagaagtccgcngccgtcgcngtcggcccagcacacggcgctgcggtatcggggtctccttctccttcgtcctcatccggnggcccggcggcggcgtcctcgtngggagagtcggtggagcgccg

SEQ ID NO: 5260 - DNA, 261 bp, Zea mays
  misc_feature: Incyte ID No: 700456695H1
gccgcgacaggaggaaggagcagcagcggcaggggaggcccggcgatctcttctgctgcgtgcggcgagggagtaaaaggagccgcgacaggatgcactcctttgggcaccgcgccaacgcggtggcaacgttcgcggtcaccatactggccgcgatttgcttcgccgcctccttctccgacaacttcaacaccccaacacccactgcctccgttaagatcttgaatctaaactggttccagaaggaggccaaggcaacga

SEQ ID NO: 5261 - DNA, 288 bp, Zea mays
  misc_feature: Incyte ID No: 700456701H1
gctgggttccacactgcggtcaaccggagaatctctctcaggttgtccaaaaagaaggcgaccagagcccgcatctcgatgatgcctattggtactccacgtgtgccttaccgaacacctggtgaaggaacctggcaatggcttgacatatggaacgctctgtaccgtgagcggattatcttcattggggacaatatagatgaagaattcagcaaccaagtgttggcaagcatgctctatcttgacagcattgataattccaaaaagataatgctatacattaatgga

SEQ ID NO: 5262 - DNA, 286 bp, Zea mays
  misc_feature: Incyte ID No: 700456707H1
  unsure 184: a, t, c, g, or other
aaagaagaagcagcagaagaaggaagaacagcaaaggctggacgaggaaggtgctgccatagcagaagcagtcgctcttcatgtcctcataggcgaggactccgatgaaccctgccatttgatgctgaacaagcaccatataaggtgcaaccattgggccccctcggctgcttttgaattcacnatggacgcacagcccgccgaggtgtacccgtctgaggatggactggtatgcggcagccatgcgtatgcttcccagagcccccaagggaggcgggctgattgg

SEQ ID NO: 5263 - DNA, 287 bp, Zea mays
  misc_feature: Incyte ID No: 700456709H1
  unsure 2, 21, 26, 34, 45, 47-48, 59, 116, 150, 183, 185, 187-188, 191: a, t, c, g, or other
gnccacccaagcttccctttngttcntcctcgcnccagcgacgcngnntcccgtagacncgagcaaggcaacccaccactgagaggcacgcagaggagcaggaagccggagaccangatgtcgtcggtgttcagcggcgatgagacggcncccttcttcggtttcctcggcgccgccgccgcncncnngcntcatgcatgggcgcagcgtacgggaccgcgaagagcggcgtcggcgtggcgtcgatgggtgtgatgcggccggagctcgtcatgaatccattcgtg

SEQ ID NO: 5264 - DNA, 285 bp, Zea mays
  misc_feature: Incyte ID No: 700456711H1
  unsure 45, 47, 63, 228: a, t, c, g, or other
atcgagccgccttcctccatcttcctcctccactccactcccaantncccaccacccccaacnccgtctctccactgcggcgcaggcttcgcttcggctccgctcggctcgagcagaagaaaatgcaacgggcagtgcaggccgtcaggtcacacggcaatgttcttaaatatgctgttctacaacacatcagcgctcccaagccagcaatgcttcctgctgcctttnctcgtttcatgtcagtttcatctgctcgcctagaggatcgtggatttgaaactgcca

SEQ ID NO: 5265 - DNA, 192 bp, Zea mays
  misc_feature: Incyte ID No: 700456712H1
taatgttcaccgttgtgatcgatatggtatgaactcgctggttccaactccttgttgattcggagtacttatatatgtctgatcagaagcagcacgtaactgcttactaccttggtatgtaaataaccccgtggtgtttgttgtatgtttctgggaggcaatgaaatgcaaattgaaggaatcagttttttc

SEQ ID NO: 5266 - DNA, 249 bp, Zea mays
  misc_feature: Incyte ID No: 700456714H1
  unsure 10, 240: a, t, c, g, or other
agtggtttcnaaagccaagtgtgtgtactagcaaccagctagctcgggcggcagcaggcagccatcatgtcggaggagaagcaccaccacttcttcaaccaccacaagaaggacgaggagcagcccgccggcgagtacgggtactccgagaccgaggtggtcaccgccaccggcgagggcgagtacgagaggtacaagaaggaggagaaggagcacaagcacaagcagcacctcggcgangccggcgcc

SEQ ID NO: 5267 - DNA, 247 bp, Zea mays
  misc_feature: Incyte ID No: 700456715H1
  unsure 161: a, t, c, g, or other
tcgtctccctgagaggtgccgagaccgaggaactggccgagtactaggtagagaatcggtttttcttgtctcagcccggggtctgctgcgtctggtggtggtgaaggggagaaattcgtgagatctgttccggatcaggcgtgcgagctcgggaatcaggngtttcacacatagcttcgtcgatttgaattgatgtactaatggagtctaagggtggcaaaaagtctagcagtagtcgttctatgat

SEQ ID NO: 5268 - DNA, 137 bp, Zea mays
  misc_feature: Incyte ID No: 700456717H1
  unsure 11, 26, 116, 121: a, t, c, g, or other
caaaaccctanctaccctcttcttcncctcactctgcctttcatctccattctaatggcggcccaacccgtccggcgaagtgtctagtgcttgtatctactatcttcatcaggtanttcgngatcctactgaagtat

SEQ ID NO: 5269 - DNA, 284 bp, Zea mays
  misc_feature: Incyte ID No: 700456718H1
  unsure 208: a, t, c, g, or other
gttcctcgctatgaagatggaaattttgttggcccaaccattctggctgatgttaaaagtgacatggagtgttacaaggaggaaatatttggtccagtgcttctcttaatgaaggcggagagcctagaagatgccatccaaatcataaacagaaacaagtatggcaatggtgcttccatatttacaacatctggcgtctctgccaggnaatttcaaacagacattgaagctggccaggtgggcatcaacgtgccgattccagtccccctgccgttcttctcctt

SEQ ID NO: 5270 - DNA, 282 bp, Zea mays
  misc_feature: Incyte ID No: 700456719H1
  unsure 207: a, t, c, g, or other
ttcctcgctatgaagatggaaattttgttggcccaaccattctggctgatgttaaaagtgacatggagtgttacaaggaggaaatatttggtccagtgcttctcttaatgaaggcggagagcctagaagatgccatccaaatcataaacagaaacaagtatggcaatggtgcttccatatttacaacatctggcgtctctgccaggnaatttcaaacagacattgaagctggccaggtgggcatcaacgtgccgattccagtccccctgccgttcttctcct

SEQ ID NO: 5271 - DNA, 282 bp, Zea mays
  misc_feature: Incyte ID No: 700456720H1
ggcgtcctggggatgaaagtgatggggaatctatggatactagcagtgagagcagcattgagaatgatgttgagcggctaagagtctcatcattactagaaggtacacatcgattggaaaatggtggcatacgaagtgatgatggtaaaggtgatgcatcttcaagctttccaatatttgagtatatggagagggatcctccatatggtagagagcctctgacagacaaggcatcaactcttgcacatagatttccagctctgaagacgttcaaaagctgtg

SEQ ID NO: 5272 - DNA, 282 bp, Zea mays
  misc_feature: Incyte ID No: 700456721H1
  unsure 2, 36, 45, 66, 69, 116-117, 202-203, 217: a, t, c, g, or other
angctctccgtagaattgttgctggcattgctcgtngtcctcgcngccggcccggcgatgcgactngtncgaggcggcttcggcgcacctgcacttttacatgcacgacgtgacgnncggcccgtccccaacggcggtgcaagtggttagcgggccgcggggcaacttcggcaacaccatggtgatcgacgacaagctaacnnaggggacgtcagantcgtccacgacggtgggacgcgcgcaggttactatatggtggcgtcggtggcgaacctcgagctc

SEQ ID NO: 5273 - DNA, 260 bp, Zea mays
  misc_feature: Incyte ID No: 700456722H1
atgacacagctgctttcaaaaacttcaataagtggggcaatattgtgtttcccctaccatttggaagagttctcagtccctccgaaagttttatccatgaactggatgagaagacaagtgcttctctgaaattcacggtactgaacccaaaaggacgcatctggacaatggttgcaggtggtggtgctagtgtcatatacgcagacactgttggtgatttgggatatgcttcggagctaggaaattatgcagataacagt

SEQ ID NO: 5274 - DNA, 286 bp, Zea mays
  misc_feature: Incyte ID No: 700456723H1
  unsure 20-21, 23-24, 188-189, 259, 261, 265, 267, 270: a, t, c, g, or other
aaagcaatggttcaggaganncnntaatcttgttgaagttgttggagaaggcatcctaggacaagctctagtaagcggagagtgtcaatggatttacgacgatacttgccacgcgttgaatcagacaagccatgctgataacggagacttacatctgggttatacttggtggcagcatcagtttctcnncgggataaagactattgcactgttacctcttcagttgcatggactggtgcaatttggttccacacggcancntatngncanagctcagtttttttga

SEQ ID NO: 5275 - DNA, 285 bp, Zea mays
  misc_feature: Incyte ID No: 700456724H1
  unsure 2, 64, 203, 260: a, t, c, g, or other
gnagaggacgtggggctgtacgccctctgggatcagcttatggggctgctgcctcacgtaagtncaacattgaagccattacactgggttaaagtgacaagggcccttcaaggtagtctgtgggaagaattgcagcgcaacgatgactcacagagtgtttcagagtttgatatatcagaacttgagagcctttttcctgcagntgttccgaagtccgatgacagctcaaaatctgaacgtagaaaatcacttggatcaanaccagaaaaagtgcacctaattgag

SEQ ID NO: 5276 - DNA, 136 bp, Zea mays
  misc_feature: Incyte ID No: 700456726H1
  unsure 65: a, t, c, g, or other
gtacgatggagccttgggtattatttcagcaatctcagcactgaaggttttgaaagttacgggtnaactccagaggttaacgagaccagtggaggtcattgcattcagcgatgaggagggcatcagattccacaca

SEQ ID NO: 5277 - DNA, 282 bp, Zea mays
  misc_feature: Incyte ID No: 700456727H1
  unsure 19, 26: a, t, c, g, or other
gcagcccagcacgtccctntctacgnctccacctccctcgattcgttccgagcccatcgcctccgcctcttcgtcaccgtcgaggtcgcaccacatggcggcgctcctagcccggcaggcagcgcaggcgctccgcgcgagacagtcggcgcagttcgggccgacaacgtcggcgatgcaggggcacctccgtacctacatgaacgcggggattcccaagcggttcaaagaggaagaggagaaagaacagcttgcaaaagatatcgcaaaagattggaatgc

SEQ ID NO: 5278 - DNA, 211 bp, Zea mays
  misc_feature: Incyte ID No: 700456729H1
  unsure 122, 181: a, t, c, g, or other
atgcctcgccgcagctcaggaaggtctgccccacgcccagctccccgtgctgctccagtgaggaacccgccacagccagcacgccaggctcctcctccagctcctgttcgagatggtggtgnctccatgtttggaggaattgggtccaccattgctcaaggtatggcgtttggcacgggtngtgccatggcacacagggctgttgatgctg

SEQ ID NO: 5279 - DNA, 277 bp, Zea mays
  misc_feature: Incyte ID No: 700456730H1
ggcggttacctcctctacttcatctctggtttcctctggtgtttcgtcatctactactggaagcgccacgcctacatccccaaagatgccatccccacaaatgaagctatgaagaagcaaatagctgtagcatccaaggctatgcctttttactgtgctcttccaactttatctgagtatatgatcgagagcggatggacccggtgttactttaatatcagcgaaatgggtttttctgcgtaccttgttatatggctatgtatctcattttgtggag

SEQ ID NO: 5280 - DNA, 282 bp, Zea mays
  misc_feature: Incyte ID No: 700456731H1
  unsure 87: a, t, c, g, or other
gtttcggaaacaagtacccgaagcgccctcatcacagaggcgcgtcgatacctcacaacggcgtcaagtatgggtgcaaaggagagntacaagtggagggacacaaagaaggcaaaccctaacatccttgtcggagcaatggtggctggccccgacaggcgtgatggctacaaagatgtccgcacgaactacaactacacggagcctactctcgcagcgaatgctggtctggttgcagcgctgatctctatatccgatatcaaaaccggacggttcggcatc

SEQ ID NO: 5281 - DNA, 279 bp, Zea mays
  misc_feature: Incyte ID No: 700456736H1
  unsure 51: a, t, c, g, or other
gtttgcaacaggcgcttcgtttagcacagactgcaaaggtggggggagggncgagcaactcccggtttcttccattcatggtccagatggcttcttatctttctgatggaagtgccaaccagcagcgtcatgtgatggccaaagctgtcaccacctacttgtccggctccccaacactggaatctcctattcgagtttcagcatctctctctgggtcccgtggtggttcaggttcctctgaggagactgtacagttcatgatggtttattcacttctgt

SEQ ID NO: 5282 - DNA, 281 bp, Zea mays
  misc_feature: Incyte ID No: 700456739H1
  unsure 2, 255, 279: a, t, c, g, or other
ancaagaagatgaagatctccagggaaatctctgacgccagtgggaagacgatcccagtggaagagatcctaacgatcgacgtgaagccggggtggaagaagggcaccaagatcacgttcccggagaagggcaacgagacgcccaacacgatcccggcggacctcgtcttcatcatcgacgagaagccgcacccggtgttcacccgcgacggcaacgacctggtggtgacccagaagatcccgctggcggaggcnctgacggggtacaccgcgcacgtnac

SEQ ID NO: 5283 - DNA, 82 bp, Zea mays
  misc_feature: Incyte ID No: 700456741H1
  unsure 2, 50: a, t, c, g, or other
gnaggcactcgtcttcttcctggagagaaaaagcagaagacaatacaaanatgtccaagatggcggaggagaaggcggcggc

SEQ ID NO: 5284 - DNA, 278 bp, Zea mays
  misc_feature: Incyte ID No: 700456744H1
  unsure 2: a, t, c, g, or other
anattgagaaaggtgatgactgggagcatgaagaaacattcactgacgatgatgaggctgtagacattgatccagaggaacgggcagatttagctcctgaaattcctgctccacctgaaatcaagcaggatgatgaagagaacgaagaagaagggggcctgagcaagtctggcaaggaactaaaaaagttgcttgggcgcgctgctggactaaatgagtcagatgcggatgaggatgaagaagacgaagatcaagaagatgattcatcgccagtggct

SEQ ID NO: 5285 - DNA, 270 bp, Zea mays
  misc_feature: Incyte ID No: 700456745H1
  unsure 87, 96: a, t, c, g, or other
acacaagatagctagctaggaacaatggagcagaaggttctcgtcgccgtgggcgtggccgtgctactccgtcgtcgtcctctccangctcaagtntgtgctcgtcaccaagccgaagcttaacctgcccccagggccatggacgctaccattaataggtagcacccaccacctggtcaccagcccgtcgatctaccgggcgatgcgtgatctcgcgcaaaagtacgggccgctgatgatgctccggctgggcgaggtgcccacgttggt

SEQ ID NO: 5286 - DNA, 278 bp, Zea mays
  misc_feature: Incyte ID No: 700456748H1
  unsure 6, 57, 193, 195, 202: a, t, c, g, or other
gtgganctctatgtccccaggaagtgctcggccacaaacaggatcatcactgccaangaccatgcctctgtcccagatcaacattggccacttggatgcgaatggcctgtatgatggtcacttcacaacgtttgctctctctgggtttgtgccgtgctcagggcgacgcagacagctccttggacaggctgtncnagaagangaaggctgatatcaagcagtagattttacatctagtttaccaagaattggacactgccttagctatgttttgaatc

SEQ ID NO: 5287 - DNA, 279 bp, Zea mays
  misc_feature: Incyte ID No: 700456749H1
gccgacgagctgcccaagacccccgtgctgtgcaagcccaacgtggacgccatggaggaggcgcttcaggatcgccaacgtcaacccgcacaaggcgatcttcttcgacgacagcgtacgcaacatccaggccgggaagcagattggcctccacacggtgctggtgggcaaatcgcagcgggtgaaaggcgcggaccacgcgctggagagcatccacaacatcagggaagcgctgccggagctgtgggaggaggccgagaaggcggaggacgtgctcta

SEQ ID NO: 5288 - DNA, 275 bp, Zea mays
  misc_feature: Incyte ID No: 700456750H1
attgatcactcagtgcaggtggatgtagcaaggtcgcagaatgccgtacaagcaaacatggaactggaatttagtcgcaacaaggaaagatttggtttccttaaatggggctctagtgctttccaaaatatgctagttgttcctcctggttctggtattgtgcaccaggtcaatcttgagtatcttggcagagttgttttcaacacagatggcattctctatcctgacagcgtagttggtactgactcacacaccactatgattgatggtttggg

SEQ ID NO: 5289 - DNA, 275 bp, Zea mays
  misc_feature: Incyte ID No: 700456751H1
  unsure 33, 109-130, 168: a, t, c, g, or other
gggcggcggctgcgactgcaacacctgcaagtncggcaccagctgcggctgctcctgctgcagctgcaactgagctggcccggcccggcgatggcgcacgagagtcgannnnnnnnnnnnnnnnnnnnnncgtataaatataatagcggcgtccagtaaataggatcntgtcaactgcacccgccattatccatggtcgctcgctcctcgcctgcgtctcctggtcctggggttcgtctgaacgtcctcgcggcttcacgacggcgatgccgcct

SEQ ID NO: 5290 - DNA, 231 bp, Zea mays
  misc_feature: Incyte ID No: 700456752H1
  unsure 128, 226: a, t, c, g, or other
attcggagaagatggtgcgcaaggcgaaggttgagttcgacgagcagccgccggataacttcgacccgaagaacccgtatgccgacccggtggcgatgctcgagtaccgggaacacctggtgcgaganaagtggatccagatcgagaccgccaagatcatccgggagcgcctccgctggtgctaccgcatcgagggcatcaaccaccaccagaagtgccgccactnctcga

SEQ ID NO: 5291 - DNA, 276 bp, Zea mays
  misc_feature: Incyte ID No: 700456753H1
gatttggaaaattaagaaactgatcaaggcattggaatcagccagaggcaatgggcacaagcatgatctctctaatccatgcctccacgtgatcaggttgctcgagtggctaagatgttaggtgatgaatatggtactgcttcgaacatcaagagtagagttaatcgtcaatctgtgttggctgccatcacctcagctcagcagaggttgaagctctacaacaaagtgcctcctaacggattggttctgtacactggaactattgttactgaagac

SEQ ID NO: 5292 - DNA, 277 bp, Zea mays
  misc_feature: Incyte ID No: 700456754H1
  unsure 6, 109, 219, 271: a, t, c, g, or other
gaagangcctcagccaccgcaaaatccccaaatccgcggcggagaggagagagccggagagaggggcgcaccagagagatcggagaaggggaagaagatggtgcgggtngcgacctacttcgcgatgaccttcggggcgttcctcttctggcagtccatggacagggtccacgtctggatcgcccttcaccaggacgagaagaaagaaaggatggaaanggagctggagataaagagaatgcaggcagagttactggcccaagctaaaganaatgaa

SEQ ID NO: 5293 - DNA, 276 bp, Zea mays
  misc_feature: Incyte ID No: 700456756H1
  unsure 209, 262: a, t, c, g, or other
gttcacattgatggtttatagcttagcttttagccattcaccatcttggactttataaccatctggcagttattgatctatcactgccttactacatgttacctatctggcagttattgatctatcactgccttactacatgttacctatctggcaattatgagatgcctattcttttcatatgtaaatcctaaaatattcgaatccanttatatgtaaatcctaaaattttcgaatccaaagccaccaattacaatattangtactgaaattata

SEQ ID NO: 5294 - DNA, 273 bp, Zea mays
  misc_feature: Incyte ID No: 700456758H1
  unsure 139: a, t, c, g, or other
tgcatgagagagatgttaacgaacttttggagaaatgccacccattgggcatgtttgacagcattgcatcacttgctgttgctcaaaacatgcgtgagctttatagattggttctagtcgatacaccactggccccttncttctcagagtgcattacatctgaggatttggatgacatgaatattgagattatgaggaacactctctacaaagcatatcttgaggacttctacaaattttgccagaaactaggtggtgcaacagctgagatca

SEQ ID NO: 5295 - DNA, 257 bp, Zea mays
  misc_feature: Incyte ID No: 700456759H1
  unsure 3: a, t, c, g, or other
ctncgccccagttgcagttgagcgtacaatgacgacaagagctgcagcttccatgcattgcgtcaacaaagatttgtccgtgaagtgactatacagtacaatctgtgcaatgagccatggttgaaatatagtataaacattgtggcagataagggattgaaaaagtctctttatacttctgctagactgaagaaaggagaatcatatatttagaaacacacataatagtagagcttgctcatggagacaagcctgca

SEQ ID NO: 5296 - DNA, 275 bp, Zea mays
  misc_feature: Incyte ID No: 700456760H1
agcagctcttgcggtcgtccctcagccgcgtcgcaccgcatcgcattctacgattcgaagctctctgctcgcaggggaccatggcgaagaactacccaaccgtgagcgccgagtacagcgaggccgtcgagaaggccaggcgcaagctccgcgccctcatcgccgagaagagctgcgcacccctcatgctccgcctcgcgtggcactccgcggggacgttcgacgtgtcgtcgaggaccggcggtccctttcggtaccatgaagtgcccggcgga

SEQ ID NO: 5297 - DNA, 265 bp, Zea mays
  misc_feature: Incyte ID No: 700456762H1
  unsure 36, 187: a, t, c, g, or other
gtagttcagtagagtagctgttggaacccacacacnggcgatggcaactgctcctgtgacatcctcccatggctacgaactccacctgtgtgcggctgcctagcatgcccctgaggcgtgcacccgccatcgtctcctttgcctctcgtccatggtcaaccgcaatgacctcatgtactggattgtngcggcactctgatgtggttgccgccgcggggcaccagaagttgatggggtcttgaacaacaacgagggactcatgttt

SEQ ID NO: 5298 - DNA, 275 bp, Zea mays
  misc_feature: Incyte ID No: 700456763H1
attgacgaggagatccgcaagcttgatgagaaaattgctgatgcggaggagaacttgggtgagagcgaagtccgtgaagcacatcttgccaaatctttgtactttataagggtcggtgagaaggaaaaggccctggaacagcttaaagtcactgaaggaaaaactgtagctgttggccaaaagatggatcttgtgttccacactttgcagattggttttttctacatggattttgatctgatatcaaaatccatcgataaggcaaagaacttgtt

SEQ ID NO: 5299 - DNA, 274 bp, Zea mays
  misc_feature: Incyte ID No: 700456764H1
tagaaaggaaggttgaacatcaattcaaaaatggactagcagagaacagaatggattctactgaggacaacaaaaacttcgtcaaaagcaaaaaaagcacactggagaaaggtagaaccagtgaaggtctatcttatgctcagaaccacgaaaccaaggtccatgattctgcacgttctcaagaaaaaaaatcccaaggatgaaagtgatgggcacaaagatttggaccaacagaagaataatgccaccaagaaagacaaacctgctgctgagc

SEQ ID NO: 5300 - DNA, 271 bp, Zea mays
  misc_feature: Incyte ID No: 700456767H1
gtccccagcgccccccgcgcacacactgtctttctctgcctttctttccctagcgccgcgccggcgccgccattcgatcaggccgcttcgccggcgacagcatattccaggtcggttggttttggcacttcggaccggcggccatggcttccgacggcatcggccccagagatgtatgtgttgttggggttgcacgcaccccaatgggcggtttccttggtgcctgtctcccttgcctgctacgaaacttggctctatagtaatcaagctg

SEQ ID NO: 5301 - DNA, 271 bp, Zea mays
  misc_feature: Incyte ID No: 700456768H1
  unsure 48: a, t, c, g, or other
aaaccagatcgccacgacaagggccgagggccccggagggcgccgtanaatggcggcaggctaccgggccgaggacgattacgattacctcttcaaggtggtcctgatcggcgactccggcgtcggcaagtccaacttgctctcacgcttcacgcgcaacgagttcagcctcgagtccaagtccaccatcggcgtcgagttcgccactcgctctctccaggtcgacggcaaggtcgtcaaggcccagatttgggacaccgccggccaggaa

SEQ ID NO: 5302 - DNA, 275 bp, Zea mays
  misc_feature: Incyte ID No: 700456772H1
  unsure 50, 101, 187-189: a, t, c, g, or other
ggaagcagcgttggtttcgtggagaccctagagaatgatcttttgggagnctcgaggcaagggtattgatgcacagattgcatctggtggtggaaggatanatgttaccatggaccgttatgagaatgactgggatgtggttaaacgtggctgggatgctcaggtgctcggagaagcaccctacatnnnccaaaagtgcacttgaggctgtgaaaacagtgagagcacagcccaaggctaatgatcaatacttgcccccattgtgatagttgatg

SEQ ID NO: 5303 - DNA, 274 bp, Zea mays
  misc_feature: Incyte ID No: 700456773H1
  unsure 67-68: a, t, c, g, or other
gtcgcgatccaattccggcgccggagaagacgcgcgcaggccccacccagccgcctacaggcgctcnngctcccacagacggacagcttgggctcgacggatgaacatgtgtgagaaagatcagaatttgccatggggatacgacctgttccgcgacccttttgctcctcccaacgggtactacgggcctcctcccggttactgtgatggccactgttgtgacctccatcattacggtagagcatcacatccagatgagactcagttgcattct

SEQ ID NO: 5304 - DNA, 271 bp, Zea mays
  misc_feature: Incyte ID No: 700456778H1
  unsure 219: a, t, c, g, or other
gttcgcactaaaatttcagcaaaccaatctattgagaaagttgaggtgttgcaatctaggacttatccattatttgttccatggaaaggtggagtgattttgggcgtccttgatattggtaaggatgcgtggattcatagagaagattggattaaaaatggtgtccacatcgggagtggcagaaaatataaggattcctattttcttcaggcgcaagtnatgtgctactacaacgtataacagtatcttatttccgagctacacacgaaga

SEQ ID NO: 5305 - DNA, 270 bp, Zea mays
  misc_feature: Incyte ID No: 700456779H1
  unsure 27, 161: a, t, c, g, or other
gatttcgtcctcccttcgccgcccgcnccaagactttcctctgccggggctgcaccggcagcgcggggtcgacaacagctcgagatccggtgactgatctcctttgtttctcgggcatcttgctagtcttcttccagattgcttcctaataatgatgacanatgaatgggctgccaatttggctcttgctggtctgagcttggcgccgcttgtggttaatgtaaacccaaatgtgaatgtggtactgacagcatgccttactgtctatgt

SEQ ID NO: 5306 - DNA, 270 bp, Zea mays
  misc_feature: Incyte ID No: 700456781H1
ctgcaagtactgcttttatgatctgtgccttgactgctgtgtggagatccgcagaggtgagattcctggaggagaagagataatgagagtaaagcctgaagatagaggccgagcatatctttttggtactactaactcaaaggatgggagtaaaaggttctccatgaggaggcacagctcatccctggagaatgagccttccaatgtagtaggttctagtgagggggcaaataactctctggagctgtggaaagcagaagtgatggtagc

SEQ ID NO: 5307 - DNA, 271 bp, Zea mays
  misc_feature: Incyte ID No: 700456782H1
  unsure 251, 261: a, t, c, g, or other
acctctgcaagggagcacatggctctcgagaaggccaaggagatcatcgcgtcctccccggtcgacctagctctccgaaaggccaaggagaccgtcgcctcccaccccgtcgtcgtcttcagcaaaacttactgtcctttctgcacccgagtgaaacaattgctagcaaagttgggggcaagttacaaggctattgagttggatgtggaaagtgatggcgctgagctgcagttcagctctcgctgaatggnctggccaganaactgttccc

SEQ ID NO: 5308 - DNA, 270 bp, Zea mays
  misc_feature: Incyte ID No: 700456783H1
  unsure 2, 14: a, t, c, g, or other
tnctcgagcaagtnaagttgcttttcctattatacttcattaataacatcttttattattaacctccaaatatagtcaacatgctctagcttaaattttttggttttcttcagcatgctttggtcatctaattgtgttgttttggtcagaatttgtctcaaacaaggatgggcggcaggaggatgatgagttcagaatctgatccatcactaaatgttgaacatcggagcatgaggagggcaccattatcgtcagctgggaacctccctc

SEQ ID NO: 5309 - DNA, 271 bp, Zea mays
  misc_feature: Incyte ID No: 700456784H1
  unsure 113: a, t, c, g, or other
tctctctcggcgacgactgggcgaccgaccaaccgtcgctgcgctatcgccaggtgccaaggtcttcttcgggtccttcgccggcgaccagcagcaccaggcatagacttgtntaagaaatggatgcaactgccggttaattgcgacacagatttatatggacatagatattggggccatgtgtaagggcggaagctgttcctaccgcgtcaataaggggagtcctgctggttctaccaggaagatccattccacagcctctcaaggtcgg

SEQ ID NO: 5310 - DNA, 271 bp, Zea mays
  misc_feature: Incyte ID No: 700456786H1
  unsure 159, 173: a, t, c, g, or other
ggaaaggccggtggagcgaaggcctgagctgggcgcccagccattcccctcatgggcatggcaagcgcagggctcccctcacgtgccgttgcaccactctgcagcatcatcaggattctctaccgccgccggggccaacggcggcatgcccctgccgtntcacccgccggcgnagttcccgactactacaaacccgttcttcttcccctagaccgcttttgacatgacagcttgctgttccggctcagctctcggcgtctgggatggcagc

SEQ ID NO: 5311 - DNA, 267 bp, Zea mays
  misc_feature: Incyte ID No: 700456792H1
  unsure 85, 94: a, t, c, g, or other
acatttactctagtgctctgaaggcgacactaacttggcagaatatgattacgattcaggagtgtcgcgaggcctgtggaggtcnaggtctgangactgagaaccgcataggaattttcaaatctgaatttgatgtccagtctacatttgagggtgataacaatgtgctaatgcagcaggtaagcaaagcgctttatgctgaatttttgggtgcacaaaagaagcagcagccattcaagggatgggtttggaacacttaaatggctc

SEQ ID NO: 5312 - DNA, 268 bp, Zea mays
  misc_feature: Incyte ID No: 700456793H1
  unsure 34, 39, 125, 188: a, t, c, g, or other
gttcgccaaagatgtcagattccacctcgaaggngcttntggaggactactcagtctatggcagtgacgaagaagctgacgaccctcgtgatgctgaaactgatgatgacctaactgatgaaganagagacatgcacgagatagatgcaggctctgtagacgagcactcaaccaagtcggatgaggancacgaggacttagccatgcgtgatgtgatggagaatggtgactggtctgacgacgaccaagctgtgggcaaaaccaagaa

SEQ ID NO: 5313 - DNA, 267 bp, Zea mays
  misc_feature: Incyte ID No: 700456795H1
caactgactgtaagcaaacgaacctggggagattgatggaagcaaatggaccaaagctgttaggatcatcatacagggatcctatatcaagttttaaccacttttacaggttttccgtagagaaccaagaggtctactggtcaatggtgctaaagcaactcgcagtcaagtttaagcaagaaccaatgtcaattctaagtacgtcagatagatcaaagaaaggggggacatggcttcaaggtgcagtgctcaacatcgctgagtgct

SEQ ID NO: 5314 - DNA, 193 bp, Zea mays
  misc_feature: Incyte ID No: 700456801H1
  unsure 2, 4-5, 8, 12, 15-16, 18, 25, 29, 31, 44, 56, 61, 70, 79, 170: a, t, c, g, or other
gncnnccnctcncgnncngaggtgncttnangatgaagctgaanatactaccttanccagnccactggcngctcagaanactacattgaagtggacgatgaaacgacaaacttcgtactttctatgagaagcgtatggccacagaagttgctgctgacgctactgggtgnagaatggaagggttatgtggtcg

SEQ ID NO: 5315 - DNA, 188 bp, Zea mays
  misc_feature: Incyte ID No: 700456802H1
  unsure 50, 96, 99-101, 133-134, 170, 173: a, t, c, g, or other
gagattctggaatcctcaatgtcattctactgaggaccataagagaaganagcagaataccagcagcagggattattggtggcttacttaaaggantgnnnggcaaggctgaagaaaatgcaaaaatgagagnncgtttgacattgacgagctccaagcgaacagttggngtncattttctacgaaag

SEQ ID NO: 5316 - DNA, 184 bp, Zea mays
  misc_feature: Incyte ID No: 700456804H1
  unsure 12, 177, 183: a, t, c, g, or other
cctacctgacgncgagggactgcattacaatgatgtgtatattgcatatgaattgatggatactgatctgcatcaaattattcgtacaaatacaagctttgtcagaggagcactgtcagtattttctttatacaaattctcgtggcttgaagtatatcacattcagcaaatgttctncaccgng

SEQ ID NO: 5317 - DNA, 185 bp, Zea mays
  misc_feature: Incyte ID No: 700456807H1
  unsure 11, 28-29, 36, 48, 62, 80, 119, 128: a, t, c, g, or other
tggctctagcngaggaactgcaaagggnnaagaggntaaatgctggcnaaaaaggaggatcncaagctgacacccaaganaccacgtaaaaaggctgcatctaaaaagctggatagcgnttaacagangatgatgattttgcaccagcggttgcaaagcgtggagctacaaccgaagaaaacatc

SEQ ID NO: 5318 - DNA, 186 bp, Zea mays
  misc_feature: Incyte ID No: 700456808H1
  unsure 90: a, t, c, g, or other
catgctgaactacccagaggcggtggaccttttatacaaaggaactatgagagttttgcttgtgttactgacatgaacttcctgaatttntttgtgattaccacttcagtttctgtgatgtgattccttcaagttgcattccaaatgcgacaatgtacattcttagtgcttttaccacgtaacatg

SEQ ID NO: 5319 - DNA, 61 bp, Zea mays
  misc_feature: Incyte ID No: 700456810H1
  unsure 12, 16, 30, 44, 52-53, 57: a, t, c, g, or other
gagcttctggantccnacaagttcattacnactgaggagcatcncgagaagnncagncaga

SEQ ID NO: 5320 - DNA, 182 bp, Zea mays
  misc_feature: Incyte ID No: 700456811H1
  unsure 95-96, 101, 104, 120: a, t, c, g, or other
gggcggagttggtgagcgtgctcgggatcagcgggtgacctacagaggttgttgcctcggggggcggggcaattctttagcaccaatcttccagnngtacnttngactcgctgctgctcntttggttggtatccttggatctctgactctagactgttccacgaaatctccagtcctttctt

SEQ ID NO: 5321 - DNA, 193 bp, Zea mays
  misc_feature: Incyte ID No: 700456813H1
  unsure 7, 12, 14, 16, 18, 20, 27, 32, 42, 85, 87, 143, 192: a, t, c, g, or other
ggcccangtccncntntncncggatcnccgcnttacctattnccagtaccccgcgcgcgagatgcgccgccccgtgtgggacctnanatcccgatggacctacgcgccgccgcaccctgctacaaggtacatacatcctcggngatagtggggttgggaagacttccttgatgaaccaatatgtgaacaagng

SEQ ID NO: 5322 - DNA, 187 bp, Zea mays
  misc_feature: Incyte ID No: 700456814H1
  unsure 46, 54, 60, 118-119, 180: a, t, c, g, or other
ggcgcaggtacatacaacaaagacaagtcttactgttcactaaaantacgagangtgagnacgaagatggcggtcatgcaagctcctaatttaacacaagggactttcaacgaacagnnctctgggcttaccagttcgctttgggcagtaccggacaaaaacttcttagtacttaaatgntaatgtg

SEQ ID NO: 5323 - DNA, 186 bp, Zea mays
  misc_feature: Incyte ID No: 700456819H1
  unsure 2, 57, 67, 75, 79, 132, 149, 159-162, 177, 182: a, t, c, g, or other
cnggatggtacttctgggttggtgctgaagcgaaaagagccagagtacaggttgggntttgtaaccnatgtagcncaancgtgacctgcaaggtttgttgacagtacgcaatcgattttgtacccactacanttaaaaaggctatgttncaatgataannnnaaaaaggacacctgnaacantgta

SEQ ID NO: 5324 - DNA, 182 bp, Zea mays
  misc_feature: Incyte ID No: 700456820H1
  unsure 22, 33, 36, 44, 83, 100-101, 103-104, 151: a, t, c, g, or other
ggcttactatacgacattttcngaagtttggtncangtaatagntatttatattaccatactaacagtgaaaaagcttttgtnccagtctcgagaagggnngnngctgaagctgccctaaaagctccgatgctgttatgggaaacgctttntaaagctatggtgggccaacagagatagagt

SEQ ID NO: 5325 - DNA, 186 bp, Zea mays
  misc_feature: Incyte ID No: 700456822H1
  unsure 5, 8, 23, 107, 130, 139, 162, 169: a, t, c, g, or other
cgcanggnccctacgaagacagntaaccgcgactacaggagcattacgagaagccgaagaaaattcgaagaacgaggtgcagctaacactgggaacggacttcgggnatggagggccgttaccggttggncaaggaggnggtcatccaagcatggtactgcncgacgtncagaggaccgaggcttc

SEQ ID NO: 5326 - DNA, 182 bp, Zea mays
  misc_feature: Incyte ID No: 700456823H1
  unsure 44, 67, 69, 78, 80, 90, 92, 178: a, t, c, g, or other
gttagacgcacctcgactcgcaacttgttggaactcgaaggggncaatagacagcaggcagggctcnanctgcgggangngattcccaangntctcgtcggccgggtagaggaagggacggggacgggcgctggcggcggacggcggcggcggggtggactgggagagcctggcgaangcca

SEQ ID NO: 5327 - DNA, 205 bp, Zea mays
  misc_feature: Incyte ID No: 700456825H1
  unsure 3, 6, 13, 30, 32, 40, 61: a, t, c, g, or other
gcnccnaggcatncaaagcggacatacctncnataccccnactacgttacctaccctacgnacgacctacatacaattacaagataccaatactttgctgctgccactacggcgataccgatacgttactcgagcaaggtccggtggccatggcacgctgccgccatcacctcctcctcctttccgtcttacttgccttggctgc

SEQ ID NO: 5328 - DNA, 171 bp, Zea mays
  misc_feature: Incyte ID No: 700456826H1
  unsure 105, 158-159, 163-164: a, t, c, g, or other
ggaaagtttaatctctgtatattgccttatgatatcaaacatggctagaccgggaatggatctatactgatgacgggcaagctagcaagcttacttcaggttccntaaaaaattttggttcacctttatttgatatggggaaagactgagagggtgtnnccannccgaagc

SEQ ID NO: 5329 - DNA, 186 bp, Zea mays
  misc_feature: Incyte ID No: 700456827H1
  unsure 40-41, 78, 113: a, t, c, g, or other
gtttgtggccaatgaacccaaaccactaagggtggacacnncactatacctacttactgtacagaagcatctgcgagncacaggaactagcttcggagtgcaaactgccttgntatatctcgttgaacgcggaggtgctaatctccccaggcaggctgacgttttccctgaccgtgataattttgg

SEQ ID NO: 5330 - DNA, 184 bp, Zea mays
  misc_feature: Incyte ID No: 700456833H1
  unsure 3, 7, 87, 94, 127, 141, 144: a, t, c, g, or other
ggnagangaagatcaaggaggtttctacatgagtggcaattggttaacaagacagaagcctatactggatgaggaagcctgaggatnttaccanggaagagtatgctgctttctaacaagagcttgnaccaacgactgggnggngcatctacgacgtgaagcattctctgttgagggtcagctt

SEQ ID NO: 5331 - DNA, 156 bp, Zea mays
  misc_feature: Incyte ID No: 700456835H1
  unsure 2, 26, 45, 85: a, t, c, g, or other
cncaatccaaaccagacaagcaaggnatcccccgatggctcatcncgttctcctcctcctctctctcgcgtcggccgcgggttgngccgccgtcgacgcgaggacccgtgatcggcgtggttccggtgagtgacagttggagtgacgcgatcccat

SEQ ID NO: 5332 - DNA, 177 bp, Zea mays
  misc_feature: Incyte ID No: 700456836H1
  unsure 28, 64, 103, 139, 143: a, t, c, g, or other
ctactgtacccaatcaaactgattgatnccgtacgcccgaagcaacaagacagaccgcggacgnggtcgtccgtccggattcggaggtcagttattactgaanagctactacgtactatggcttctctggacgccgtgnaggngactcgccctgctgattctgtactgaacaggcga

SEQ ID NO: 5333 - DNA, 183 bp, Zea mays
  misc_feature: Incyte ID No: 700456837H1
  unsure 5, 11, 53-54, 62, 174: a, t, c, g, or other
ctacnagcaanaaacgaactcgtccgtggacagcatcggcgtacgcgctgagnnctatacgnacctaccacggcggcgcgtcggggtggggatggcgctattcttgttcctccctgctctcaccacgcgactcttccgtggcctcctgcggtctaaggaggccaagcgccagangctcgaaaa

SEQ ID NO: 5334 - DNA, 178 bp, Zea mays
  misc_feature: Incyte ID No: 700456838H1
  unsure 5, 67, 96, 98: a, t, c, g, or other
gtcgntgggacggtgctcggccctggttcccagcgtgcaaagagtgacaggatggctgcgttgtttnctggcttccctgaaaccgtaccctgttananctgtacaaccgccgtgttcatctgggctacaggcagtagcgatgtacgcgctgctataaaggctggttactatgcacata

SEQ ID NO: 5335 - DNA, 178 bp, Zea mays
  misc_feature: Incyte ID No: 700456840H1
  unsure 75, 87, 89, 106, 122, 126, 134, 143, 157-158, 160: a, t, c, g, or other
gcttgcccaatcagagcaatgaagttctccgtactactacctgttgtgcgtgttgctgttcagtgcaaggttgcntatgacttcccncnctagtcgaaggtttgangcgtatagcaaagtcngatnctatggtnctatgtacnatggaagaatctgnngngcatatcattgctggagc

SEQ ID NO: 5336 - DNA, 183 bp, Zea mays
  misc_feature: Incyte ID No: 700456841H1
  unsure 4-5, 21, 99, 123, 129, 133, 135, 154, 160, 167, 180: a, t, c, g, or other
ggcnnggtggcatcgaggacntcaagtacgtcggcagggccccgtacggctgctaccgcgaagggcttctactacggtgcagtgcaggagcagcacggngctggtgcagaaggcgctgacagngaaagncccncnactaccctttctgaaagancacgangcccctntagattcttgganttg

SEQ ID NO: 5337 - DNA, 181 bp, Zea mays
  misc_feature: Incyte ID No: 700456842H1
  unsure 48, 124: a, t, c, g, or other
ctacgcctaccccagctctacccgcgacgaagcatacaccaggtaggntgacgggctcaatggatctcccggccaagggcggtttcagcttcgacctgtgccgccgcaacagtatgctggagangaacgggctacaaactacccgggattacaggaagaccggaacaaccatcgtcggcct

SEQ ID NO: 5338 - DNA, 181 bp, Zea mays
  misc_feature: Incyte ID No: 700456843H1
  unsure 39, 47, 50, 54, 57: a, t, c, g, or other
cggacacaggcacgatcacgagctcagccggacgggacngagcgggnggngggngancgcttcggtcccccccaacccaaactacctccccttcccgacaaggcgacgcgaagagaatgaccgctgtacgactgcatgctgctgctgaagacgacggtgaccagggaggtctagcggaact

SEQ ID NO: 5339 - DNA, 178 bp, Zea mays
  misc_feature: Incyte ID No: 700456844H1
  unsure 22, 134: a, t, c, g, or other
ctttccttttggaggacatcanacgatgaaaattacagatgttcggcaggctgctgtctatggtgtgggtgtctgtgccgagtttggtggtcatgtttttcgcccactagtaggagaggccttatacaaaattnaacaatgttataaggcatcctgatgcacgacttccgataatatc

SEQ ID NO: 5340 - DNA, 175 bp, Zea mays
  misc_feature: Incyte ID No: 700456845H1
gttggccgccaggcacatcgttgccattgagaatccgcagacattatcgtgcagtctgctaggccctatggcagagggtgtacctcaagtttgcgcatacactggtgcccatgccattgctggcaggcacactcctggtacattcaccaaccagttgcaaacctccttcagtgag

SEQ ID NO: 5341 - DNA, 166 bp, Zea mays
  misc_feature: Incyte ID No: 700456848H1
  unsure 43, 66, 87, 159: a, t, c, g, or other
gtggacctctatgtccccaggaagtgctcggccacaaacaggntcatcactgccaggaccatgccnctgtccagatcacttggccantggatgcgatggctgtatgatggtcattcacaacgtttgctcttctgggtttgtcgtgctacaggcgacgcnacagctc

SEQ ID NO: 5342 - DNA, 175 bp, Zea mays
  misc_feature: Incyte ID No: 700456849H1
  unsure 25, 50: a, t, c, g, or other
gggcagacaggagggttgccacagngcttggtcttaccgaagactgatgntgcaccttgtgtaccagcgatgattccttagtgcgtgaagctgctactaggcggcctccttgagttggcgcgggacaagactctggtaacgcgctacctgaccagaaaagtgaaagactgctcaa

SEQ ID NO: 5343 - DNA, 189 bp, Zea mays
  misc_feature: Incyte ID No: 700456850H1
  unsure 2, 41, 44, 86, 103, 144, 152, 155: a, t, c, g, or other
gngcacgagacgaccagacgcccataccatacgcggcaaangcnaagaacgacccaggaatctacggacaccgtacgccccccttnctactactagctcaaangttgctgctggagccctctacccctactctaccgaccaccnaccatggntgnggcgccagttgtggagtccaaggatggaaccatc

SEQ ID NO: 5344 - DNA, 175 bp, Zea mays
  misc_feature: Incyte ID No: 700456851H1
  unsure 10, 71-72, 74-75, 142-143: a, t, c, g, or other
gttttacaantgaacacgttccagaatatcagccctggtgcaccaaactacgctattacaagttgctgtgnnanntatcagacagccagtgtggtacttcaatgacaaaattccactgcatgttttctttggtgaagatggnnaaatggaacgagctagttttacttgaggctgg

SEQ ID NO: 5345 - DNA, 183 bp, Zea mays
  misc_feature: Incyte ID No: 700456852H1
  unsure 8, 10, 37, 50, 81, 113, 151, 157: a, t, c, g, or other
tacaggtntntactagaactgaaccctacagacagancattaccattggnatattaccccattaaataccagtatgtgatnttatggataccataccctgaactgccgaagtntacccaacaaacaactgtgaaaatagaactctggtagngaagtnagaacattgtaccggatgattatact

SEQ ID NO: 5346 - DNA, 178 bp, Zea mays
  misc_feature: Incyte ID No: 700456853H1
  unsure 3, 5, 8, 18, 22, 60, 66, 100, 139, 148: a, t, c, g, or other
gtncntcnactaacgacngacnacgggaagaccgttccagcaaaccaggacgccgaacanagagangctggtcaactgggcgcggcggtgggcggccccncgagcgttcgacttcaccaccaagggcgtgctgcaggcngccgtccanggcgagctgtggcgcatgatggacggcaag

SEQ ID NO: 5347 - DNA, 181 bp, Zea mays
  misc_feature: Incyte ID No: 700456855H1
  unsure 21, 39, 81, 127, 143, 159: a, t, c, g, or other
gtcaacgggcaccttacgggnctgaacgggacgtgtacngtgtgggaggcgctggtgctggagatacgtgatgaccttacnggctgtgtacacggtgtacgccacggcgtggaacccgaagaagggncagcctgggcacctcncccccattgccatcgnttcatcgtgggggccaacatcc

SEQ ID NO: 5348 - DNA, 186 bp, Zea mays
  misc_feature: Incyte ID No: 700456858H1
  unsure 23, 26, 29, 44-45, 102, 129, 157: a, t, c, g, or other
cgtcgacaagacagagctacggnggnggngcggtaccgcatacnncacccgtgtacctaacctacctggtggaacggctaccctacagaggaaccacatganccacaccgctctggtgctacacctgcncctcgacgcgctaacatcgaggcggggntagggctggcggagtggttcaagagggac

SEQ ID NO: 5349 - DNA, 165 bp, Zea mays
  misc_feature: Incyte ID No: 700456861H1
  unsure 17-19, 52, 54-55, 65, 75: a, t, c, g, or other
aactaacaccgaatttnnngtttccgcaaatcaagctcaccctggcacaaantnntccacaaagngtgcctctgngctgtagattttgtgtctcggttctgcgtactacaccaaactaccggtgcacgcttggaggcgttaatcctccttctttgatgaatgcgg

SEQ ID NO: 5350 - DNA, 178 bp, Zea mays
  misc_feature: Incyte ID No: 700456862H1
  unsure 8, 17, 28-30, 32, 39, 81, 85, 89, 94, 105, 107: a, t, c, g, or other
gtgctaanttgcaaggnacagtggttgnnnangaggctntaacaggaccaggtcaaaatacatcggggagggcttgatggnatancganggaangacaggcgtangntctaagattaaggtcctggaggatgagctaaaacttgttgatgctgagattggattgcttcaagaagattt

SEQ ID NO: 5351 - DNA, 190 bp, Zea mays
  misc_feature: Incyte ID No: 700456865H1
  unsure 8, 139, 141: a, t, c, g, or other
gactactnttacgccatggctgacctgctccctaccaggctacctaaacctacactactgagctcctactttacctaccgctacctgccgcctcggtaccagctaccctacttcccaccgcctacccgctgccacacgncngtcgctccactaccctaccgcttctgctctgctgtaccccgagtttgtc

SEQ ID NO: 5352 - DNA, 168 bp, Zea mays
  misc_feature: Incyte ID No: 700456866H1
  unsure 2, 10, 53, 133, 135: a, t, c, g, or other
cnagggaggnatgtggtgctcgatgagtacggcaaccccaaagttgtgaatgntggagtcatattgcccgtgcattgagctgtatgatccaatggaaaatgctggtgcgcttgattcgtgaggttgctagccngnaccatgattcagctggtgatgggactacaactg

SEQ ID NO: 5353 - DNA, 192 bp, Zea mays
  misc_feature: Incyte ID No: 700456867H1
  unsure 2, 4, 34, 55, 74, 76, 104, 117, 126, 170, 185: a, t, c, g, or other
cncnaagaccatacgaacgaccaatctaccacgnaccggacccgtaccaaacttnccaggacattacccctttnancgaccctactgctaggtggacaccgatnacctgcgaggagnaaatttgtncacgacccaagaacgggctttcacggtggacgatgacgagaagnggtgactcagtgtgntgtctgc

SEQ ID NO: 5354 - DNA, 184 bp, Zea mays
  misc_feature: Incyte ID No: 700456868H1
  unsure 41, 95, 165: a, t, c, g, or other
gttagccgagagctacctactgactcctctacgtgtatggnccgaaacaggcagagcgaaccagtactaccagagcgctacccctggcgtacggngctgcggcgacccctgtacgttcagactgtggtgctgaaggttgccataccactgaccatggctgcagangaaggtccggaaggtgctc

SEQ ID NO: 5355 - DNA, 187 bp, Zea mays
  misc_feature: Incyte ID No: 700456869H1
  unsure 2, 65-66, 68, 71, 110, 138, 158, 182: a, t, c, g, or other
gnagccggactcctacctaccgcctacccgcagacagccaacaaccccgtaccgtcaccagaggnngnggnggcggatgtacgggatcgaaggtgtaacacccttgaggnggtggccaagcacaaacaccaaggacgnctgctggctcgtacatcggnggcaaggtgtacaatgtgcaccangtttc

SEQ ID NO: 5356 - DNA, 174 bp, Zea mays
  misc_feature: Incyte ID No: 700456872H1
  unsure 68, 74, 117, 146, 148, 150, 153, 158: a, t, c, g, or other
gtcactaacaccgagggtgctgagctcattgactctgttctggatgttgtgaggtcggaagctgaganctgtgnctgcttgccggattccaagtatgccactcccttggtggtggtnctggatctggtatgggtacgctgttgatntnantcnaacanggaagagtaccctgac

SEQ ID NO: 5357 - DNA, 176 bp, Zea mays
  misc_feature: Incyte ID No: 700456874H1
  unsure 7, 31-32, 37, 129, 164, 172: a, t, c, g, or other
gtaaggnggtctctgtaccatggctcgtacnnagcanactgcccgcaaatcgaccggtggtaaagcacccaggaagcaactggctacaaaagccgctcgcaagagtgcgccctctactggaggggtgcngaaacctacatacgttacggacctggtactgtggngctcctgnaatt

SEQ ID NO: 5358 - DNA, 170 bp, Zea mays
  misc_feature: Incyte ID No: 700456875H1
  unsure 33, 55, 85: a, t, c, g, or other
ctcagagcagccgcatccacaacctgcctctcncgtccctggcggcgtccgcggncaggatggcggatctacgggaggaggtganggatgtcaacccgcacgagttcgtcaaggctactccgcccacctacaagcgctccggcaagatggagctcctgagtgggttgact

SEQ ID NO: 5359 - DNA, 180 bp, Zea mays
  misc_feature: Incyte ID No: 700456876H1
  unsure 7, 13, 47, 59, 76, 86: a, t, c, g, or other
gtgctcntgctcnccgccctccccctaccgccacctacgacgcgganagggaaacccangaccgccgcgaacccanccaccgtagngaaccgcgcggcatggtggcgcttttacataacctatgctagtttgcctgatgctacatttccacgatggttaagctgactatgatagcgcgtg

SEQ ID NO: 5360 - DNA, 214 bp, Zea mays
  misc_feature: Incyte ID No: 700456877H1
  unsure 11-12, 33, 73, 75, 88, 94, 102, 107, 117, 120, 133, 137, 142, 148, 164,177, 193: a, t, c, g, or other
ggcgcctctgnngctgtacgggatgccgctgtncccccaacgtggtgcgcgtggcgcaccgtgctaccacganangggcctcgaattncgagantcgtaccnccgtncgaacctacnatnatgcggacgaccnaacnaaganagaccncgaactgttcgtacgnacccctaacaaanaccttatacggtaccngaataccccggtctcctacgt

SEQ ID NO: 5361 - DNA, 181 bp, Zea mays
  misc_feature: Incyte ID No: 700456878H1
  unsure 2, 20, 23, 33, 39, 46, 50, 53, 56-57, 88-89, 101, 103, 121, 135, 140,146, 157, 165: a, t, c, g, or other
gngatggcacatcggcatgntgnaccatgaacnaaaggncggacgngagntgnaanngaatggagcgagctcttacaccaagcagggnntcgcgaatacangntacctgaaggaatttggngctcgtgttgaccntcgancaatanaccgtgagctntatatatntatttacatacatata

SEQ ID NO: 5362 - DNA, 227 bp, Zea mays
  misc_feature: Incyte ID No: 700456879H1
  unsure 2-3, 18, 36, 43, 61, 64, 77, 86, 109, 127, 130, 186, 222: a, t, c, g, or other
gnnaccgaacccggacgncctactaccggaaggaancaaactncaaacccccccccaccgncgnccacggcaaaaangcccggatncccccacgaattgggcgacgatncccagccacccagggcgnaanaccgggacggtggacggacggcgccaagccaacgaactaactggacggtgggccanacgcgcggatggaactataacgagaaagactggagnaaggt

SEQ ID NO: 5363 - DNA, 180 bp, Zea mays
  misc_feature: Incyte ID No: 700456880H1
  unsure 31, 121, 124, 126, 167: a, t, c, g, or other
gtagcctctaccatggctagcgctaccctgnacctcctactacggcgcgcgcccctgagaacctaccccagcaggccgacctccactgctccatgccgacaccccctgttcctcttctctntancncattccctctcccacgccacattttatctctgatctatggncacacggcgcagc

SEQ ID NO: 5364 - DNA, 161 bp, Zea mays
  misc_feature: Incyte ID No: 700456882H1
  unsure 2, 7, 10, 65, 72, 96: a, t, c, g, or other
cngctcnagngcggagtctgtctcttgcttcaacagtgtttggacggaacagatccggggactcncttccanctcgacgccctccgatttctctcngcttgcaacctccgggaccatcttctcggccttctgcttctgggactgccgcacgtttttgtggt

SEQ ID NO: 5365 - DNA, 170 bp, Zea mays
  misc_feature: Incyte ID No: 700456883H1
  unsure 2, 14, 21, 74, 78, 82, 93, 101, 110, 118, 122, 125, 134, 156-158, 162,164, 167: a, t, c, g, or other
gnttcatgcgtggntcctcgnagaccccgaacccgcgtgcactcaatccctaggcggcggactaccggcgcgangtancggncggcacccatngagtccgnggcggagtncaaggagnagcncgncgcgctacnggtcggtgaactcctgcgcgannnctcngncancgc

SEQ ID NO: 5366 - DNA, 170 bp, Zea mays
  misc_feature: Incyte ID No: 700456884H1
  unsure 4, 13, 20-21, 23, 30, 37, 39, 57, 60, 74, 79, 97-98, 102-103, 108-109,147: a, t, c, g, or other
gtcnaggcataanggctctnntngtgttcnggcagtncnaatgtcatgcaaacaacngcngttgttctgaagtngcttntcagggcctacaacaacnntggnnaaggnnttgactgtgatatcttggatagtgatcaaactggagangctaatttgaggggggttgctct

SEQ ID NO: 5367 - DNA, 182 bp, Zea mays
  misc_feature: Incyte ID No: 700456887H1
  unsure 18, 21, 36-37, 40, 57, 112, 123, 126, 131, 136, 142-143, 174: a, t, c, g, or other
tcccgcagaaaagagaanganaacgccgccgctagnncanccgtacgttaccccggngaacctacctaccaacgattaccgttgataccagctatggatcacttggacgaancatgaaagtgntgncatgnatgtnggggtnncttcagctggcccctccagactcagaaagangaggtcca

SEQ ID NO: 5368 - DNA, 177 bp, Zea mays
  misc_feature: Incyte ID No: 700456890H1
  unsure 2, 17, 61, 64, 74, 78, 81, 129, 132: a, t, c, g, or other
cnaagctttgcaaacanctgatagccgaattccgcgcgccggtaccctaagcaaaatgcangtnctaggtagtngatnagntgccatttcccagtaatttttcgttattatatatacgcgacacggganggnggggagacactctgttcaaccaccagccgagttcgacgcggcact

SEQ ID NO: 5369 - DNA, 173 bp, Zea mays
  misc_feature: Incyte ID No: 700456891H1
  unsure 4-5, 11, 21, 25, 31, 42, 50, 54, 58, 78, 83, 111, 113, 148, 159: a, t, c, g, or other
gganncgaccncacggtaacnacancgcagnggcagcggagngcaaacantgangggnacatctggtgagcactttgngtttncagctccaagaggtggcatgtataagtncngcttccataacccatatggagcacctgagactgtntacttctacanaccatgttgggcac

SEQ ID NO: 5370 - DNA, 172 bp, Zea mays
  misc_feature: Incyte ID No: 700456894H1
  unsure 54, 62, 77, 84, 95, 97: a, t, c, g, or other
cgttcaggtagcgagagttatacgtcgtcggcggtgaagatggtgtcgctgaanctgcagangcggctacgcgtaancgtactncaagtgtgggnanggccaagtctggcttgaccccaatgaagtcagcgagatctccatggctaactcgcgccagaaacatccggaagtt

SEQ ID NO: 5371 - DNA, 160 bp, Zea mays
  misc_feature: Incyte ID No: 700456901H1
  unsure 159: a, t, c, g, or other
cgctccggcaagtaccgcaagtcaatctacaagaggatatccaacttgtccacgtgcagtaacctaacaatccttctgctctggattgttatgatattgctggtttactacataaagcatgttagccgcgaggtccaagtttttgagcctttcagtatnc

SEQ ID NO: 5372 - DNA, 283 bp, Zea mays
  misc_feature: Incyte ID No: 700456902H1
  unsure 256, 270: a, t, c, g, or other
atagttactggtgccggtgacgaaacactccgtttttggaacgtgttcccctctccaaagtcccagagctctgatagtctaagttgcatcgggggtacatcgtttgttagaagctacatccggtgacccgcagaaacgtagtttgaactgagctcataaggtaattgcagcatatgtggatgatcatcagcatcatcccattcatgacaaccatgccatcaggtcgtcaaccatccaaggtagctgaatttttgangtgccacggcgcanccgatggaagagt

SEQ ID NO: 5373 - DNA, 281 bp, Zea mays
  misc_feature: Incyte ID No: 700456904H1
  unsure 166, 175, 182-183, 187, 198, 205: a, t, c, g, or other
gggcggtaacaccatcaccgtccactggtaccggaggaaagcaaacctccatcacgtgtgggatgtcagcattattgatacggcaatcaaggacttctacaacaagagcatggataccatggtagaggctctcaagatgaatcttacagatggatggtctgacganatcgtccantgggaannttcnaagaacaaacnacgcganctgcgcgaacgactatgcgattgagagcatccattattcctgcaactacgcctacaaagatgtggagcaagacatc

SEQ ID NO: 5374 - DNA, 289 bp, Zea mays
  misc_feature: Incyte ID No: 700456905H1
  unsure 46, 101, 145-146, 166, 172, 176-177, 181, 194, 206, 217-218, 223, 231,242, 255, 258, 263, 267, 270, 279, 283: a, t, c, g, or other
agcactcgtttccaggtatgttcaccagggcaagggaatgcttcancgccatcagctgcttgcggagtttgatgccctgtttggatagtgacaaggagaantatgcaccctttgaagacattcttcgtgctgctcaggaagcaanngtgctccccccaggggttgnacttgntatnnggcnaaggccggttgtntgggattaaatncggggaaaatnnaagtnatcttggntttgtaagganttgagttgtttgnttntgaangtgnggntttcaaggnaaanttgggt

SEQ ID NO: 5375 - DNA, 287 bp, Zea mays
  misc_feature: Incyte ID No: 700456910H1
  unsure 2, 8, 33, 38, 44, 48, 50, 82, 99, 114, 195, 231, 233, 236, 248-249, 252,255, 272, 286: a, t, c, g, or other
anccatcnactggactgcccaatctgtgatcanggtgnggagtncgancntccatgatcagtctatggcatttggtgctgancgaggtcggttcactgngataaagcggtcagnctgtggacaagaatctgggtcccttaggataagtcagtacatgactcgttgcatccaatgtacaagatgtgtcaggttgtnactcaggttgctggtgttcaagaccttggtatggtncngtncgtggcaagtgnnaanagnactggaacctttggtgnagaaacctgtgggnt

SEQ ID NO: 5376 - DNA, 283 bp, Zea mays
  misc_feature: Incyte ID No: 700456913H1
  unsure 16, 18, 28, 65, 93, 113, 135, 147-148, 175, 181, 205, 221, 228, 240,262, 282: a, t, c, g, or other
gtcggcatctcttggnangccatccgcnggcaagaccgtggattggagatatgtcctcgccagcncacatttccgacgcctcttctcggacgngtccaagaagaactacgagnactattaccccaagggtaaganggaggtgcctannggagatggtacaaacaagtctgaatcnaagcangaatcgaatacagatgaacgatgnaattttcaggataatnctatganacacatgcagantttccttgcgcctttattgatncttggctgatgctatcatcnt

SEQ ID NO: 5377 - DNA, 284 bp, Zea mays
  misc_feature: Incyte ID No: 700456914H1
  unsure 54, 242, 264, 277: a, t, c, g, or other
gcaagcagagagaacatcagcccaaaggatccgcacccacacaactctttgttnaactgcaaagggccagatctgaatattccagctgaggatgtttctctccagaaacagtcagatcacaaaggtgatgacatctctaacccagatttactgagtatggatgatgggttagctacatctaaagctcagtcatctgagcctcaacctcctctggtaaatgaaggagttggggcaattaccantaaagtagaaggtgaagtccancccaacgaggttnccaagag

SEQ ID NO: 5378 - DNA, 108 bp, Zea mays
  misc_feature: Incyte ID No: 700456916H1
  unsure 12, 23, 27, 50, 74, 78, 86, 93, 99, 102, 104, 106: a, t, c, g, or other
gcgtgttaagantgataatatgngctngcttctgcaagaaagtgaagganctaaagggaacatttcatttattnccanatcagacntgttttnagggantanantncg

SEQ ID NO: 5379 - DNA, 281 bp, Zea mays
  misc_feature: Incyte ID No: 700456917H1
  unsure 91-93, 95, 175, 183, 234, 242-243, 253, 260, 264: a, t, c, g, or other
cttctccgcgcgcaacaccggcctgccgcgaatgattcttgggaagccctgtacctgactactggatccactaccaagctcttcaagttcnnngntccattcctctttgtcgggcaagagctcttggcctctgtggattatcagcctgattcacaactctctgcaagaattcgancgcagatnggccaagaaagcgcggctgacgcgattcctggtttgatggttctttgggtntttcgggnnaaaagactcnctttttntggntaactccccaaagttcc

SEQ ID NO: 5380 - DNA, 271 bp, Zea mays
  misc_feature: Incyte ID No: 700456919H1
  unsure 5, 17, 36, 52, 54, 58, 95, 112, 183, 189, 217, 241-242, 249, 259: a, t, c, g, or other
gtctngggaacagaggntcaacgtcgcacttcgagnggcccgagcacttgcngncacncaccatgattgccggccacagatcctgtcacctcaanatcaagtcatccaacantatgttagatgggaaatacgaagctaagctatctgactatggattggggaagctgttgccgatttctaggnagcatngaattgagtagaatgcacaccgcaattnggtacattgctccggagctgtcanntccaacnttgagatagnacgacaagagtt

SEQ ID NO: 5381 - DNA, 277 bp, Zea mays
  misc_feature: Incyte ID No: 700456920H1
  unsure 69-91: a, t, c, g, or other
ctcgtctgcttctcactctcctcccacccactccagaaaacctcacaaaaaccctcgctccccacaacnnnnnnnnnnnnnnnnnnnnnnntgtaccagcggcgtcaagatgagtcggcaccctgaagtgaagtgggctcagaggatcgacaaggtttacatcactgtacagttacctgatgccaaggacgctaaggtcaatttggaaccagatggtgtcttcacattctctggcagtgttggtacaaattatatgaattgaaactagatctgaatg

SEQ ID NO: 5382 - DNA, 122 bp, Zea mays
  misc_feature: Incyte ID No: 700456924H1
  unsure 13-14, 16, 36-37, 48, 90-91, 104-105, 114-115, 117: a, t, c, g, or other
cgaaggcattaannanttggcatctgtagccaaagnncaaggaaagancaatgtttctttccttggtttcttcatgctaggaaagctggnngagtgtcttcaanngctaatagnnancactc

SEQ ID NO: 5383 - DNA, 286 bp, Zea mays
  misc_feature: Incyte ID No: 700456928H1
  unsure 27, 204, 207, 279: a, t, c, g, or other
gatagatcacgagcttcgcaaacttcnggttgatagactgggggcttagctgagtttaaccatcccaggccaaggaatataatgtccgcgttgcatcgaggtatttcaagggacctgaacttccttgttgatttacaagactatgattattctttggacatgtggagtcttggttgcatgtttgctggaatgatatttcgcaanganaccattctttatggccatgacaacccatgaccaacttgtgaagattgcaaaggtccttggaacagatgggtngaatgct

SEQ ID NO: 5384 - DNA, 275 bp, Zea mays
  misc_feature: Incyte ID No: 700456929H1
  unsure 40, 42, 48, 94-95, 103, 129, 131, 146, 172, 175, 187, 194, 200, 203,208, 226, 240, 243, 257, 260, 266, 270-272: a, t, c, g, or other
ggcgaggagggcaggaagaccgaagaccgagccgtgcggngnctcggnacgggaacgggacaggacctcaaaatctcagatccttcctgcccgnncgcccgtncccgtcgacgcgtcgttcttgccggncngcgccccactccgcncttcctcctccagggggatcggatangcnaaaggctgcgcnatgttcntgtgtnttnggtanaggtccctcatctggaancccggcttctattntangacaaaatcctggnttnattaanggtnnnaag

SEQ ID NO: 5385 - DNA, 278 bp, Zea mays
  misc_feature: Incyte ID No: 700456930H1
  unsure 8, 201, 204, 213, 230, 232, 238, 241, 265: a, t, c, g, or other
gccgcgcngctctccgtcatgaaaatggtgatccagacgaagagcgtggagtacatgccgctgttcctgtcactggcttccctggtgaacggcatctgctggaccgcctacgcgctcatcgcttcaacttctaataacatccccaacgggctgggcgtgctgttcgcgctggcgcaatggctcctgtacgccatctatacnagnacaaccagnggttgtggaagcacgcnancgcaangcngggccaggtcgcatgacggaagtngtcgtcgacggca

SEQ ID NO: 5386 - DNA, 274 bp, Zea mays
  misc_feature: Incyte ID No: 700456936H1
  unsure 11, 30, 48, 52, 57, 77, 87, 90, 100, 110, 118, 127, 129, 141-142, 157,161, 164, 184, 187, 196, 208, 213, 223, 239, 243, 261-263, 267-268: a, t, c, g, or other
caacccttcgnactcagtttccatcattgngcatggcgtccgataccnaggncatcnccgccctctttcttcgatgnacaacgacgncgnggaagaggangatgccgacnagcccagncctcctttncnagcgcttcccgnngccgtaacttcttcntcgntgntgtcccctcaagccggggcngangaccccaancctgctgtggcnctccntcagttcccntcccgaggaattgggngagnttaaaaccttgggggttnnnaccnngcccgg

SEQ ID NO: 5387 - DNA, 278 bp, Zea mays
  misc_feature: Incyte ID No: 700456938H1
  unsure 22, 25, 107, 147, 163, 167, 187-188, 244, 257: a, t, c, g, or other
cagagacaggcgtcttcgtacncgnctatctccgcgacccaaagcgttcccccttctcccattcttctctcatttctcaccaccgccgccgctaccccctttcgacnacaccatgagggagtgcatctcgatccacatcggccaggncggtatccaggtcggnaacncgtgctgggagctgtactgnntcgagcatggcattcaggctgatggtcagatgtcccggtgacaagaacaattgggnggaggtgatgagnctttcaacaccttcttcagtg

SEQ ID NO: 5388 - DNA, 275 bp, Zea mays
  misc_feature: Incyte ID No: 700456942H1
  unsure 16, 58, 67, 86, 220, 233: a, t, c, g, or other
tgagccaccggaagcngagacgtgagcactcgaccaaccccgtcgatccggctgcggngcggcgtgntagatcgctaccgaccatngtggtggaggagatcgccgagggggtgaagaacctaaccgtcaccggagatgcggcggcttcaggcggagaggggcagaggaggggcggcggcggcagcagcaaccgcatccaggtgtccaacaccaagaaacncctcttcttctangtcaaactcggccaagaagtatatgcaacagcacggcgatgt

SEQ ID NO: 5389 - DNA, 279 bp, Zea mays
  misc_feature: Incyte ID No: 700456947H1
  unsure 21, 43, 46, 128: a, t, c, g, or other
gtgcgtgcaatcgacgcagangcgcgggcgctcgcaccaccanaancacgacccgatggctttcatgcgctcccgctcaaatgcatcttctggcatgggatttgctcctaacattagggagacattcnttgagcttcaaatgaagaaggcattccgatatgttatcttcaaaatcgaagagaagcaaaagcaggtggttgtggagaagacaggggctactactgaaagctatgatgatttttggcctctctcccagagaatgactgccgatatgcgctg

SEQ ID NO: 5390 - DNA, 114 bp, Zea mays
  misc_feature: Incyte ID No: 700456948H1
  unsure 108: a, t, c, g, or other
gttaacgactacataaaggcggggtcaatagaaggcaaggtggttgaaataggactcacttctacttcattgatcaatccagaaaagctccctgtcatagctacccanctcttt

SEQ ID NO: 5391 - DNA, 271 bp, Zea mays
  misc_feature: Incyte ID No: 700456951H1
  unsure 57: a, t, c, g, or other
gtcttgggaacagaggttcaacgtcgcacttggagcggcccgtgcacttgcttaccntcaccatgattgccggccacagatcctgcacctcaacatcaagtcatccaacattatgttagatgggaaatacgaagctaagctatctgactatggattggggaagctgttgccgattctaggaagcattgaattgagtagaattcacaccgcaattgggtacattgctccggagctgtcatctccaactttgagatataacgacaagagtgat

SEQ ID NO: 5392 - DNA, 267 bp, Zea mays
  misc_feature: Incyte ID No: 700456953H1
  unsure 39, 126, 206, 243, 251, 264: a, t, c, g, or other
ggagcattcgagaagccgaagaaaattcgaagacgaggngcagctacactgcggacggacttcgggcatggagggccagttccaggttggcaaggaggaggtcatccaagcatggtacatggacgncagtgaagaggaccagaggcttcctcatcatcgcgagcccaaagaattgctccctctcgacaaactttccggactagggntattaagctggcgcctaaatgctgatgattgggagantgatggancctcaagaaattnggg

SEQ ID NO: 5393 - DNA, 272 bp, Zea mays
  misc_feature: Incyte ID No: 700456955H1
  unsure 3, 23, 57-58, 69, 94, 98, 100, 114, 116, 128, 136, 148, 210, 213, 242,245, 251, 264: a, t, c, g, or other
ggnagcaagctcccggggggtgnggagccgtcgtggaccacatgcccctattcctgnngccctaaactncacccattgatgtggatgccatcgnagangnagttcaggcagtancnccttcgcgagtncccctgcnaaggaggaacangagaaccaggagggaacctataacagtggttgacttggaggttgaagctagccgggaagggngcnaacgccagaaggttgaaccagtatgacgncanctctanccagatttgggancaaggtct

SEQ ID NO: 5394 - DNA, 270 bp, Zea mays
  misc_feature: Incyte ID No: 700456957H1
  unsure 50, 57, 106, 188, 195, 198, 207, 211, 242, 262: a, t, c, g, or other
tggacatgcactctggatgcacatttaatcaccgctatgtcaagtccaanccaaganaggttgaaaatgcaacctggatgctaactgtttttcattgttttgggcnctacttctgcttgcactttgaggcatttcagcttgggttggcaccagtatacatggctttcctacgatttatgggtgacganaatgatnctnggaattacnctanagccttaaggttgggcaaatggcaggaagangatatgggaggaaccccccnccgcatcc

SEQ ID NO: 5395 - DNA, 270 bp, Zea mays
  misc_feature: Incyte ID No: 700456958H1
  unsure 14, 144, 181, 198, 224, 234, 238, 268: a, t, c, g, or other
accacggcatcgangccactctcatggacgccatgatggacgcgtcgaggagagttcttcaggcagccgctccaggagaagcagaagcacagcaacatgatcgacggcaagcacttccagctccaagggtacgggaacgaccgngtggcgtcggaggaccaggtcctggactggtgcgacngcctttacctcttggtngagcctcaggaggacaggagcttgantatggcccgntgtntaaggtgtgatttcccatgatgttaatcgntt

SEQ ID NO: 5396 - DNA, 277 bp, Zea mays
  misc_feature: Incyte ID No: 700456959H1
  unsure 2, 17, 47, 151, 168, 217, 219, 221: a, t, c, g, or other
angaatgagagtttgancaatgttttgagcaacattgacgatgaatncagcttcgctttccacttttgtccttgagttggataaacttgcagggagttggcgtaaaactgagtctttagaggacattcagtgcaaccaagctgctccggantgtacagttaagcatancagaattttgcaacatgccgctgaagtttacacacataaggtctaatangncnattgaaacagatttcctagatggatgtagtgctacttcatatcagggcagctcatt

SEQ ID NO: 5397 - DNA, 275 bp, Zea mays
  misc_feature: Incyte ID No: 700456960H1
  unsure 135, 148, 171, 180, 186, 193, 199, 205, 220, 222, 229-230, 232, 240-242,245, 251-252, 261: a, t, c, g, or other
cccacagcaggtacatcagcaagatgtaggggatctgggatactcgcttggaagatatgaagataaatggactccagaagatcgatggtattcaaggaattacatgtgaaattttctgttgtacccttaaaaagntgattgcatagtnccgtgttactataccaatcatcntttaggggnccaccngaaaggntgtttntagagnaccggggtgctcggngnttggtanngnttgctaannncanctgggnnagggcctgnatccccaccatttt

SEQ ID NO: 5398 - DNA, 275 bp, Zea mays
  misc_feature: Incyte ID No: 700456961H1
  unsure 263: a, t, c, g, or other
ctcttcccttgaggcaaagctttccaggaaatcgctggacatgtcaagtgttgcttcagatttgaagacatcagggtctgttccttcaacaccacccttagtatccagagcagatccatcatcctccagggggcattctcaacctacagattcagattcgatgaagaaagcacggcggtcaccagggtatcaattatacagacaagtttcggacagcaaaattccatctctcagatctctcaatgagataagctcccctgaangaaggccttcgt

SEQ ID NO: 5399 - DNA, 274 bp, Zea mays
  misc_feature: Incyte ID No: 700456962H1
  unsure 38, 138, 145, 148, 151, 155, 157, 159, 168-170, 175, 178, 182, 187, 193,199, 205, 226, 231, 238, 264: a, t, c, g, or other
gctgaaatggctgggatgagccataggattcgtgaganaactgatgctctagatgctgcaggaaataccacggctgcaattgggaagggttttgccattggctctgcagccttggtttcccttgcacatttggtgcgnttgtaanccnggntggnancnccactgttnnnggtcngantccnaaagnattcancgggcntattgncggtgctatgctcccgtactngttcncggcaangaccatgaagagtgtgggcagtgctncgctcaaaat

SEQ ID NO: 5400 - DNA, 173 bp, Zea mays
  misc_feature: Incyte ID No: 700456964H1
  unsure 101, 110-111, 121, 123, 126, 136, 139, 147, 150-151, 165, 168-170: a, t, c, g, or other
tctaaagggaagagtgctgatggatcttggctctggtgcaccacagaggatagcgtctatgacgctgtcaaatctatgactcagcacaacgtgggagcttnggtggttgnnaaacccggcncngantaaatcaatnggnggtatttntcnntagagagattttcnccnnngga

SEQ ID NO: 5401 - DNA, 291 bp, Zea mays
  misc_feature: Incyte ID No: 700456965H1
  unsure 26, 32-33, 98-99, 256, 265, 268, 279, 281, 288, 290: a, t, c, g, or other
ctgagcagtgtgactgcttatggttntgatcnngtccgtggaacccaaactcttgggcttgtcacgagtgctggtttccctgctggaaagtacctctnngctggtgttgtggatggacgcaacatctgggctgatgatcttgctacatctctcagcactctccagtctcttgaggctgttgttgggaaggacaagcttgtcgtatcaacttcctgctcgctcatgcacaccgctgtgggagctgtggaaccgagantagcttganaanggggttaagtntnggcttgntnt

SEQ ID NO: 5402 - DNA, 284 bp, Zea mays
  misc_feature: Incyte ID No: 700456968H1
  unsure 138, 156, 178, 207, 217, 246, 251-252, 254, 257, 260, 272, 277, 281, 283: a, t, c, g, or other
cttgagaatattcttaaagtaggggagcacgacaagaccatgggcgcaacaggtgacattaatgttttcgctcagatgattgacgacgcggaaggcctggaaaaaatcgagaacctacagagccatgataataatganatctatgaaaaggctgtnaagcttcttgagacttactggntggaggaggaagatgatgcaatggctacngctggggaanctgctcctgctgtttttgactttagccanggggnnanccnccnggggggggtttnaaacntaancng

SEQ ID NO: 5403 - DNA, 287 bp, Zea mays
  misc_feature: Incyte ID No: 700456970H1
  unsure 56, 92, 151: a, t, c, g, or other
gtcggcttccgccagcgcccagctggaggtctcgctgttcccttcacgatacgccnccccaaagcggatcaaaccctagatctcgtcttgtngccccgttcctccgatcccatcctatccgatcctcatggattcctcctcgtccagcctnagccagcagcccgagttcgactacctcttcaagctactccttatcggcgactccggcgtcggcaagagcagcctcctcctccgcttcaccgccgactccttcgatgacctctcccctaccataggtgttgacttca

SEQ ID NO: 5404 - DNA, 260 bp, Zea mays
  misc_feature: Incyte ID No: 700456971H1
  unsure 72-92: a, t, c, g, or other
acacaagcgtgctccttctggctcttgtgctaagtagctagctcacaacagaagaggacgagaggaagcaannnnnnnnnnnnnnnnnnnnnaacaacatacaccgctggccgtggcgccatgggcatcctggaccacatgtcgcatgtgtgcagcatcacggagacgaaggaggcgctcaagctcaggaagaagcgaccgctgcagacggtgaacatcaaggtgaagatggactgcgaaggttgcgagcgtcgcgtgaa

SEQ ID NO: 5405 - DNA, 289 bp, Zea mays
  misc_feature: Incyte ID No: 700456975H1
  unsure 39, 67, 131, 143-144, 146, 162, 183, 198, 207, 220, 225, 239, 241, 249,268, 277, 282-283, 286: a, t, c, g, or other
cggacttgtctcccccgagtgtcgtgtcgcacacctgcncctcctcctcgtgcggactcggctgccnccctagagccgtgtcgcacgcctcaggtacttctgttctccgaggttcctttggtttggttctnctcaaggtttannanggttgcctatctcttnctctgtgctccgtgatgtctngaaggtcatgtctantaggtccangaacgatccaagnaaacngggtcagggggtancngaaaagantccggcgggtttggaatanaccccccanggttnntgnggg

SEQ ID NO: 5406 - DNA, 287 bp, Zea mays
  misc_feature: Incyte ID No: 700456977H1
  unsure 135, 141, 231, 249, 251, 272: a, t, c, g, or other
ctcactgctcgttgccggctgcccccgcggccccggccagtccatcccctcgctcgctccccaactccagcaggcagatcagatacatccatccattcgcggaccggaaggaaaggaagggttgaactatgagcnccgtgncggtttcgtcgtcgctgaacccggacgcgccgctcttcatcccggcggcgctgctgcaggtggaggacttctcgccgcaatggtgggacntcatcaccaacatggccngnttccgcgaccactgggtccgngagcggcccaacttg

SEQ ID NO: 5407 - DNA, 288 bp, Zea mays
  misc_feature: Incyte ID No: 700456979H1
  unsure 15, 21, 50, 66, 92, 148, 180, 191, 216, 220, 224, 227, 244, 263, 283: a, t, c, g, or other
ctttgacagcacctngcatgntcataacttcaagcctcaaatgatggtangttactgatttggatnatgttttctggccattgcctgatgancctcttggttaatttggtcgactcaagacatgttgtggaatcatttcttgatagcntgccaaatatgtgtcatgacaatgtaaatgtngagtctgctcntggtccagcacttaaatcagctttncatnggtnatngagtcaaattggggggnagttggctggcttccaagngtacttggccatctcttggnaatgg

SEQ ID NO: 5408 - DNA, 293 bp, Zea mays
  misc_feature: Incyte ID No: 700456981H1
  unsure 100, 216, 218, 233, 237, 239, 242, 261: a, t, c, g, or other
tccgtttggtgagtactatgaaagggatgtgaacattgcaaacaatcgctttgatctcttgatggtggactacataccagaagcagtccatcttatatcngcatttgttacaaccaaacccagaggcaagaccgacagcagtatatgtcatgcaccatccactcttttggagccctgaattgcgtctttcgtttctaagggataccagtgacagantnggggaaacccggtgnaaantnacntcataaacacactggaaancatagggtctttggcgttggtggaaaatgggg

SEQ ID NO: 5409 - DNA, 263 bp, Zea mays
  misc_feature: Incyte ID No: 700456984H1
  unsure 89, 135, 142, 149, 157-158, 164, 167, 176, 211, 214, 217, 221, 240-241,247, 251-252, 254, 256-257: a, t, c, g, or other
gttgttgagaagtccactgtccctgtcaagaccgctgaggctattgagaagatcttgacccacaacagcaagggcatcaactaccagangcctttccaacccagagttccttgcggagggcactgccattggggncctgttnaagcttnagagtttnntaatcngtnggcgggaanacccttgaggaaagaaaggccgtccaaggcttctnaanggntgtntcactcccggtgggtcccnngagggnaggnntncnnccaacc

SEQ ID NO: 5410 - DNA, 287 bp, Zea mays
  misc_feature: Incyte ID No: 700456985H1
  unsure 43, 56, 60-61, 76, 105, 190-191, 244, 265, 267: a, t, c, g, or other
catgtacaacctttagcaattgacctagtggaaaagatgctancttttgatcctanacanngaataactgttgaangcgcacttgcacacccttacttggcatcncttcatgacataagtgatgagccagtctgctcaatgcccttcagcttcgacttcgagcagcatgcattatctgaagaacagatgnnggatctgatctaccaagaggctcttgcattcaacccagattaccagtagccanagttcggttccagccggtgantncgttcattgacatggagatt

SEQ ID NO: 5411 - DNA, 287 bp, Zea mays
  misc_feature: Incyte ID No: 700456986H1
  unsure 231: a, t, c, g, or other
gataaaactgaagctcaaagctgtctacatgtatgctgctggattttacacatattcaattttcgctctcctgttctgggaaacaagacgttcggactttggagtatcaatgtcccaccatatagcaactgttgttctgattattctttcctacattttccgattcgctcgtgttggcactgttgttttagcccttcatgatgcaagtgatatattcctagagattgggangatggccaagtacagtagctgcgagtggctagcagttatggcatttcttctttttg

SEQ ID NO: 5412 - DNA, 288 bp, Zea mays
  misc_feature: Incyte ID No: 700456991H1
  unsure 62, 269: a, t, c, g, or other
cgctccttgcccctaagcctcgtttccggtgtacgactccaacgacgacgagatggcctccnccgctccgtcggagcttcccctccctcggccgcgcgcttctcacgccggcgccggcgcggatgctctccgcggaggcctccgatgccctcgttgagatcaagcccagggagattgggatggtctccggcatccccgaggagcacctccgccgtaagttgtaatttattcaccagctaggactgcatctcagcaaggttcaggcaaantgggaagtggaaaattaac

SEQ ID NO: 5413 - DNA, 288 bp, Zea mays
  misc_feature: Incyte ID No: 700456992H1
  unsure 6, 70, 125, 220, 225-226, 232, 235-236, 240, 252, 259, 267, 269, 271: a, t, c, g, or other
caagantcagctacagttgctggcgacagaaaatatgatgtatacatgggtattgatgtttttggacganatacatttggtggtggtcaatggactacaaatgttgcccttgatctacttaaganagttgatatctcagctgccatatttgctcctggatgggtatatgaaactaagcaaccacctgactttcagagagcgcagaatcattggtggggcnttgtnngaaaanccnngggngtactcggggcnatcctcnagcaactncntnctactcgggtttatcag

SEQ ID NO: 5414 - DNA, 256 bp, Zea mays
  misc_feature: Incyte ID No: 700456994H1
  unsure 52, 66, 75, 114, 129, 136, 145, 147, 163, 167, 172, 184, 189, 194, 206,212-213, 239, 243, 245, 254-255: a, t, c, g, or other
cgaatccgagggttcaagcgaccgacggcgaacatggcggcggacggcggcncagcgacgtcggcnctggaagangccctcaagcccttccaggaaagagcctccgaggctganatacgcatagcgaantagaaanctttctttnanacaaagattggccggncggnttatncgagggaacttnctctngcgtnaaggatctccantcgaanntaaatgtggttatgagaatgctttanttananggggagagnnt

SEQ ID NO: 5415 - DNA, 278 bp, Zea mays
  misc_feature: Incyte ID No: 700457001H1
  unsure 193-194: a, t, c, g, or other
gtacttttgggaaccggtgtctcagcatctcgtcctctcagctttacgcctggggcccacaccagctcaaactacaccaaaaccaatacgtgcagcaccagctgttgtccctgctcctgataaacaggccagtgctcccaaggggaacatgctgagcttcagaagaaaacaatagctcttcttgaggagtatnntgcatacgtattttagatgaagcccatcaatgtatcgtggagctgcagagtcctgattactacccagaaatgttaaagaagctg

SEQ ID NO: 5416 - DNA, 235 bp, Zea mays
  misc_feature: Incyte ID No: 700457006H1
  unsure 10, 23, 28-29, 39, 50, 54, 66, 76, 84, 88, 98, 114, 117, 124, 136, 144,146, 159, 172, 187-188, 190, 211-212, 224-225, 227: a, t, c, g, or other
cgtcgccatnggcgcactcttgnaggtnntttcatagcnagcaattgcantttngcaagatatctntcgtcaagtncttagcantttnctccacttgngcaactttggtgcctncanatgtgangttgccaatgangccaatgnancggagtctgggangaaagaggactcntcctcaggaacaggnnancttcaatcgtttgcctggatnntcggctcattcnncnggtgtttg

SEQ ID NO: 5417 - DNA, 261 bp, Zea mays
  misc_feature: Incyte ID No: 700457008H1
  unsure 2, 107, 129, 155, 175, 178, 180-181, 206: a, t, c, g, or other
angggatggtgctttctacggcccaaaaattgatattggtgtgtttgatgcccttaagaggaaatttcagtgtgcaaccctacagctggattttcagctgcccattnggttcaagctggcttattctgntgaggatgaagccaaaattgaaaggnctgtgatgatacacagggcnatncnncggttcggttgaaaggatgcttgcnattcttttggagcattacaatggtaaatggccctatggctaagccctcgccaggc

SEQ ID NO: 5418 - DNA, 269 bp, Zea mays
  misc_feature: Incyte ID No: 700457009H1
  unsure 19, 35, 52, 111, 128, 147, 258: a, t, c, g, or other
tgaacattctaatacaggnatttgaaaggcgaatngcttttagtaaacaacngattgctagcttcatcaaaacccacatttttagtcggaggcgtcctatcgatggatggnagtacatgattgaaganattggccccaacgcaaganaaggaaaggggagtgtgcaaagattaccaagtgtcagtgatcctgcaacccagccttacagggaagaaactcctgcaattgcttctagttcctccttcagaggcaatcggncatgatggtgt

SEQ ID NO: 5419 - DNA, 274 bp, Zea mays
  misc_feature: Incyte ID No: 700457010H1
  unsure 184, 264: a, t, c, g, or other
gacaagcaaggaatcccccgatggctcgcgttctcctcctcctctctctcgcgtcggccgccgcggttgccgccgccgtcgacgcggaggacccgctgatccggcaggtggttcccggtggagatgacaacgatctggagctgaacgcggagtcccacttcctgagcttcgtgcagcggttcgncaagtcctacaaggacgccgacgagcacgcgtaccggctgtccgttttcaaggccaacctgcgccgcgccgccggcaccngctgctggac

SEQ ID NO: 5420 - DNA, 278 bp, Zea mays
  misc_feature: Incyte ID No: 700457012H1
  unsure 31, 65, 77, 124, 145, 168, 171, 193, 201-202, 211-212, 235, 243, 256: a, t, c, g, or other
cacaaacacaagtcgtcgtaggcagcgagcntctctcctctcccacgcatcgcgccaaggaaganagagagatacgncgctcccccttctcggcgtcggtggtgcgggtgccctccctcctcgngcgagatctgtctggtcacanatctatctgacaaaatggtgaanatntgctgcatcggtgctggctatntcggtggnncaaccatgnncgtcattgccctcaagtgcccanacattgangtcgtcgtcgttnacatctccaagccccgcattga

SEQ ID NO: 5421 - DNA, 278 bp, Zea mays
  misc_feature: Incyte ID No: 700457013H1
  unsure 2, 7-9, 14, 30, 59, 66, 113-114, 183, 199, 201, 251, 253: a, t, c, g, or other
ancaaannnatccnacacatctgctaatanggatggctgccctaacacaaactacaganggtcctngcctcggcgagcaggagatgaagaagatgtctcccttccttccatannactctgtggggagatttctttctttcttacgaggctccgaccgaggcacaggaagctcaaatgagaganaaggctggagtgctancnacaagaagtgagaaacatgattaaaggttcacatgatgtgcccgaaatantngaccttattatcacctgcagcgact

SEQ ID NO: 5422 - DNA, 279 bp, Zea mays
  misc_feature: Incyte ID No: 700457017H1
  unsure 2, 13: a, t, c, g, or other
ancacggcatcgnggccactctcatggaacgccatgatggacgcgtcgagggagttcttcagggcagccgctccaggagaagcagaagcacagcaacatgatcgacggcaagcacttccagctccaagggtacgggaacgaccgggtggcgtcggaggaccaggtcctggactggtgcgaccgcctttacctcttggtggagcctcaggaggacaggagccttgacctatggcccgcatgtctaaggtgtgatcttcccatgatgttgatcgattaatt

SEQ ID NO: 5423 - DNA, 272 bp, Zea mays
  misc_feature: Incyte ID No: 700457018H1
  unsure 64-65: a, t, c, g, or other
tagcagctcggcgctccctcttctgactccttcgaggtactcccatcgctatcgaccgggtccnncgagcgcgggagatggcggatcaggagaccccagttgcagttgaggcccctaccccggtccttggggagccgatggacttgatgactgctctgcagcttgtcatgaagaagtcgggtgctcatgatggccttgttaagggtctcgtgaggctgccaaagcaattgagaagcatgctgctcagctttgcgtgcttgcggaggatgtga

SEQ ID NO: 5424 - DNA, 183 bp, Zea mays
  misc_feature: Incyte ID No: 700457020H1
  unsure 3, 8-9, 13, 30, 91, 109, 163-164, 171, 181: a, t, c, g, or other
acnaacannagtngtcgtaggcagcgagcntctctcctctcccacgcatcgcgccaaggaagagagagagatcgccgctccccttctcggngtcggtggtgcgggtgcnctccctcctcgagcgagatctgtctggtcacagatctatctgacaaaatggtgnngatctgntgcatcggtnct

SEQ ID NO: 5425 - DNA, 264 bp, Zea mays
  misc_feature: Incyte ID No: 700457023H1
  unsure 2, 198: a, t, c, g, or other
gnaatagtcaatacccaggtacttgctttcaatggccagcctgttaaaaatttaaagaacttggcgaccatggtggaaaattgcaaggatgaatttttgaagtttgatctggagtatgaccagattgttgtcctcgagacgaaaactgcaaaggctgctacccaggacattctgacgacgcactgtataccttctgcnacgtcggatgaccttaaggcctagtgggagaagggagcatgacgcagccctgggcctgggccaggg

SEQ ID NO: 5426 - DNA, 261 bp, Zea mays
  misc_feature: Incyte ID No: 700457025H1
  unsure 96, 107, 141, 160, 180, 195: a, t, c, g, or other
gccactctcatggacgccatgatggacgcgtcgagggagttcttcaggcagccgctccaggagaagcagaagcacagcaacatgatcgacggcaancacttccagcnccaagggtacgggaacgaccgggtggcgtcggangaccaggtcctggactggngcgaccgcctttacctcttngtggagcctcaggangacaagagccttgacctatggcccgcatgtctaaggtgtgatcttcccatgatgttgatcgattaa

SEQ ID NO: 5427 - DNA, 272 bp, Zea mays
  misc_feature: Incyte ID No: 700457027H1
  unsure 2, 9, 12, 46, 56, 62, 65, 68, 103, 148, 159-160, 179-180, 240, 251: a, t, c, g, or other
gncagtgcnaangtttatatcaacggtcatccaatctctgaacganctctccgganatcagnganganagttggtcctgttggccctggttcatattggtacnactaccgtgctggattttggggtgtcatcggacaagagtgtagangcatcataccnncattcataaaagaattcanntatccaatgcccaagaactgcgctggtggtagcactggggttttcgtaaatgggagaganctccaccaganagattttgatttgctgtaggg

SEQ ID NO: 5428 - DNA, 273 bp, Zea mays
  misc_feature: Incyte ID No: 700457028H1
  unsure 191: a, t, c, g, or other
aagctttttgaagttactgttgaacctgcagatgggctggctccggtctggcacagtgatgtcaaattttattgagtcaaagactcttccagtagccctgttgcttacttttacttcgatccttattcaagaccatctgaaaagcgtggaggggcttggatgaatgtagtcttttctcgaagtcgcgtgcnagctcgcaatggtttggctgctaggctgcctgttgcccatatagtgtgcaatcagactccaccagttggcgagaagcccagt

SEQ ID NO: 5429 - DNA, 267 bp, Zea mays
  misc_feature: Incyte ID No: 700457030H1
  unsure 29, 50, 102, 108, 128, 137, 141, 152, 157, 172, 184, 197, 215, 247: a, t, c, g, or other
tagtgttgcctccgacaaatcgccgggcnccatcaccatacacggagagnaaaaaaacggggcccccatactactgtaaaccccgccgtggtggccgttcgnagcatncagcaggggtaggatgtacnacgtgcacntgangctcgtgcttngtganaccgcgggatgcgcnccgccgccgctnctggccatggggnaaaagttagagcttgcgnagataatggaggaaggatgttacgaagtccgncgtggactgatttcgtacac

SEQ ID NO: 5430 - DNA, 276 bp, Zea mays
  misc_feature: Incyte ID No: 700457031H1
  unsure 117, 158, 265: a, t, c, g, or other
gtcgtccctcagccgcgtcgcaccgcatcgcattctacgattcgaagctctctactgctcgcagccatggcgaagaattacccaaccgtgagcgccgagtacagcgaggccgtcganaaggccaggcgcaagtcccgcgccctcatcgccgagaaganctggcgcgcccctcatgctccgcctcgcgtggacctccgcggggacgttcgacgtgtcgtcgaggaccggcggtcccttcggtactatgaagtgcccggcggaatgnctcacggcgcc

SEQ ID NO: 5431 - DNA, 260 bp, Zea mays
  misc_feature: Incyte ID No: 700457032H1
  unsure 2, 54, 62, 64-65, 68, 85, 88-89, 91, 98, 101, 103, 106, 110, 115, 128,133, 138, 141, 143, 146, 149, 156, 166, 175, 182, 213, 231, 234, 256: a, t, c, g, or other
cngccttgtaatcgagaaggatagtttcccgcatgataccctggaaattgttgngtggacanannatnggttgatcatggctgcncgnnanaggatanacnancanattnagggngtgcaattccatngggcnagcancananctnctnaagggangctcatggtnaacaatttnatcaagnttattgaaggctacgaagcctccgaattgcnctcccgtgatttatctanttngaagcagcagcagccctgcgtngggc

SEQ ID NO: 5432 - DNA, 267 bp, Zea mays
  misc_feature: Incyte ID No: 700457034H1
  unsure 9, 31, 36, 55, 59, 61, 63-64, 110: a, t, c, g, or other
ggaatcganctcacggtaacgtcaccaggtngcaanactgtgtacacattgaagntatnangnnctgagaaatttgagtttaaagctccaagaggtggcatgtataagtntctgcttccataacccatatggagcacctgaaactgtttctttctacatccatgttgggcacatacccaatgagcacaatctggcgaaagatgagcactggaccctatcaacgttaaaatcgcggagtgaaggaagcatagaatcatcaccgccgag

SEQ ID NO: 5433 - DNA, 269 bp, Zea mays
  misc_feature: Incyte ID No: 700457035H1
  unsure 2, 182: a, t, c, g, or other
gnggaatcgacctcacggtaacgtcaccaggtggcaacactgtgtacacattgaagggaaaatctggtgagaaatttgagtttaaagctccaagaggtggcatgtataagttctgcttccataacccatatggagcacctgaaactgtttctttctacatccatgttgggcacatacccaancagcacaatctggcgaaagatgagcacttggaccctatcaacgttaaaatcgcggagtgaaggaagcatagaatccatcaccgccga

SEQ ID NO: 5434 - DNA, 273 bp, Zea mays
  misc_feature: Incyte ID No: 700457037H1
  unsure 8, 15, 32, 38, 40-42, 47, 55, 60, 62, 69, 89, 91, 93, 108, 126, 141,168-169, 171-172, 182, 255, 261: a, t, c, g, or other
tttcggtntcatctncgtccacatccgtcctncagcantnnngtagncatcgaangatgncngccgtancgatttgcgaacaaggagancngnagaggaacccgaggnaggcgaaaatgatctacngcaactggtcgctgntctcgtccacagtcgtcattttgggcnncnncgccaccgcnggcctcgccggtatcttcctcttgggcggcaaggagaaattcaatggttatctgtgccgcgaaggcgagaggnttaggngcaagacagagc

SEQ ID NO: 5435 - DNA, 271 bp, Zea mays
  misc_feature: Incyte ID No: 700457038H1
  unsure 138, 141, 155, 162: a, t, c, g, or other
cagcaacggcttcttccgaggtgttccgatggcggtcctggccatggacgacgcgacgcgcgtggggcaagcggcccttacttcacgacacacgaggagctcctggaggaggagtactacgacgagcaggcgccgganaanaagcgccgtctganggcggancaggtgcagctgctggagcggagtgccgaggaagagaacaagctggagcctgagcgcaagaccgagctggctcgccgcctggggatggcgccccgccagtggccgtgtg

SEQ ID NO: 5436 - DNA, 276 bp, Zea mays
  misc_feature: Incyte ID No: 700457040H1
  unsure 2, 6, 10, 54, 193: a, t, c, g, or other
gnaganaggnactgtttacactgaagcttccaaagctggagccaagggcttgcntttcctcaaagttatggagaatggggagcttgaaggaatcggtccactgttatcgagtctgaaacctgaaaagaaagaccagctcatggaacttctggacacaaagacgggtgaccttatcctgtttgcactgggtgancaatcatcagctaatcagattcttggacggttaagattatttattgctcataagctagaggtgatagacactctgcacattca

SEQ ID NO: 5437 - DNA, 270 bp, Zea mays
  misc_feature: Incyte ID No: 700457041H1
  unsure 2, 15, 50, 96, 101, 109, 143, 146, 161, 170, 174, 181, 184, 195,217-218, 231, 233, 247, 249: a, t, c, g, or other
gnacatgtggaaganaaataagatgaacacttttggaattatctacagcnggtttcttgcaaaggttgctagccaacttgaggtgttacctgaganctganttccgggnggcatttgaggaagcaatgagctacggtggcaangtnctcctaggagaccgncctgtccanatcnctttgangangacctgggggnaaatgtcactatggcacagggnnaaatttctgtacnanatcatttccagtcngnattttaccaagcccagaggaa

SEQ ID NO: 5438 - DNA, 269 bp, Zea mays
  misc_feature: Incyte ID No: 700457042H1
  unsure 14: a, t, c, g, or other
agaatctgcaaaanagcttctctcaaagcttactgaatttagtgacacaacaatcgatccatctcttccgaaacctgcatttcaagttgctaggaaggctcagggctcagtggggaaggggagagaaacgactgcagttgaaatgaagaagggtgactggttgtgcactaactgtaacttcttaaattttgctcgcaatcgtcactgtctcgaatgcaaagcagatggaccaaagaagatagaagcggccgtggatgcaatgaaaatgg

SEQ ID NO: 5439 - DNA, 266 bp, Zea mays
  misc_feature: Incyte ID No: 700457043H1
  unsure 4, 56, 94, 97, 115, 180, 186, 195, 249, 260: a, t, c, g, or other
tcgnaaagatcgggtccaggtacgacgtcggccatctcatcccggcgggttttgangttgccgcccacggcaacgactacgccgtctgggaganagncggcgccgaacaagtgantcgagcataatagagtgctcgagataccgatttgattctcagtacaatgtacacgggactgcatncataanataagtggnttctcctctaataagtaagggagcgtaaaagggcaatggagccatgcatatgtnacctgaaatantgttga

SEQ ID NO: 5440 - DNA, 268 bp, Zea mays
  misc_feature: Incyte ID No: 700457044H1
  unsure 267: a, t, c, g, or other
agcaacggcttcttccgaggtgttccgatggcggtcctggccatggacgacgcgacgcgcgtgggcaagcggcccttcttcacgacacacgaggagctcctggaggaggagtactacgacgagcaggcgccggagaagaagcgccgtctgacggcggagcaggtgcagctgctggagcggagttcgaggaagagaacaagctggagcctgagcgcaagaccgagctggctcgccgcctggggatggcgccccgccagtggccgtgtng

SEQ ID NO: 5441 - DNA, 266 bp, Zea mays
  misc_feature: Incyte ID No: 700457049H1
  unsure 6-7, 242: a, t, c, g, or other
tctctnnaacagcagtatcactgcaacggatgtggaatatgtagaatcggagggagggagaatttcttccactgttcaaaatgtggatgttgctattcaattgcgctgaagaatagtcatgcatgtgttgaaggggcatgcatcatgactgtccaatctgcttcgagtacttgttcgattcgacaaatgatgtttccgtcctgccttgtggtcataccattcatgtaaagtgcctgaaaganatggaagagcacgccagtttgcat

SEQ ID NO: 5442 - DNA, 264 bp, Zea mays
  misc_feature: Incyte ID No: 700457051H1
  unsure 24, 34, 54, 153, 155, 157, 159, 171, 187, 202-203, 211, 254: a, t, c, g, or other
ccttctcactgcctgtccggcgcngccgcttcgncgctgcccgtttcttcgaancactccgaagctgccccgccatggacagctccgccactgacggcgcgaggctaccgccgccaagggccgggagtcgcctctgcgttcaggtgcggtganangnangccgcgctgaancggcccaaaaccctanaacagatctgtagannatgcttcnatatcatctttgaggacgaaattcatcaaactattgtccagantctctgttta

SEQ ID NO: 5443 - DNA, 267 bp, Zea mays
  misc_feature: Incyte ID No: 700457053H1
  unsure 44, 128-129, 151, 154, 166-167, 172-173, 176, 182, 186, 203, 205, 210,237, 247, 249, 251: a, t, c, g, or other
gtcctcgtggtcgatccgcccgtgggatctcgcgcacgccaggnttggagagctgcggcctccctccgccccaaccagccatgggttcccgcgttgattgcggcgcttagacgcggaggaggagaganncacggggaggggggaggccgangcntaggaggcgtanntctgnncanggcgcnagcncgttcgttcggcatggnanagaangccggctcgttcctcgccgtgcgtcgnctctccggtngngncatccaccaccatcgt

SEQ ID NO: 5444 - DNA, 265 bp, Zea mays
  misc_feature: Incyte ID No: 700457054H1
  unsure 4, 74, 84, 178, 192, 216, 218, 222, 231: a, t, c, g, or other
cggnacggagacggcgaacggggctgccggcggcgggaagcgctccaaagacatggagtcatttcaaactggtnctatcaagcnaatcgaagccttgcaacaagtttttcagtacgattgggtgcccgtttggtgagggatgtcgttttctgcactttgtccctggcggttacccggnagttgcaaaaatgntcaatctaggtagccctgctgtancngcgncatcaaganctcatgtggatcacgccgctcttactggcgcctc

SEQ ID NO: 5445 - DNA, 165 bp, Zea mays
  misc_feature: Incyte ID No: 700457055H1
  unsure 2, 4, 45, 64, 86, 88, 118, 120-121, 127, 157: a, t, c, g, or other
gnantagtcaatacccacgtacttgctttcaatggccagcctggntaaaaatttaaagaacttngcgaccatggtggaaaattgcnangatgaatttttgaagtttgatctggagtangnncagatngttgtcctcgagacgaaaactgcaaaggcngctaccca

SEQ ID NO: 5446 - DNA, 273 bp, Zea mays
  misc_feature: Incyte ID No: 700457056H1
  unsure 15, 85: a, t, c, g, or other
gaatctgaataggcncatctatcctgagtttgtagtcaccgtcaaattgccttctaaaacaaaagattacttcgtatcgcaagangactgccagaattcatctgatctgtcactggtgttgaattctagttcacccgactgtatttcagaggagatgaacctggaggcacctccagcattgggaggtggatgtgcagcccccatgctaggagattcgatggcaaaggctccaagctcaccttggatgcctttctctatgttgttgcagcgatc

SEQ ID NO: 5447 - DNA, 264 bp, Zea mays
  misc_feature: Incyte ID No: 700457057H1
  unsure 2, 114-115: a, t, c, g, or other
gngagaactaatatggaagggtgcatgccttgcaataaatgttgacaaatggtattcatgcttagaggagatatgtgcatgccatagtttaccaccacctacagaggatgaganncttcctgttggcactggtagcaacctgtcttcattgtctcgggcaatgtgattaaaatatatgctgaaggaggattagtttattctgtccatggtttgggcacagagcttgagttctatgatctcctgcaaaaaagtggtcaccttgat

SEQ ID NO: 5448 - DNA, 266 bp, Zea mays
  misc_feature: Incyte ID No: 700457058H1
  unsure 89: a, t, c, g, or other
cacacaaacccatcgcagggcattctcgagcatagcttctctgcctctctctcccctcctctacctctccgtccactcctttgtccaangcttcgagatggctcagcagaaggtggtggtcagggttccaaccatgacagatgacaagatcaagcagaaggccatcgaagctgttgcggacatttacggtattgactccatagcagcggatctgaaggagaacaagatgaccatcataggcgagatggatgcagtagcgatgccaa

SEQ ID NO: 5449 - DNA, 264 bp, Zea mays
  misc_feature: Incyte ID No: 700457059H1
  unsure 52, 56, 65, 71, 95, 150-151, 250, 255, 262: a, t, c, g, or other
tcgtaaagatcgggtccaggtacgacgtcggccatctcatcccggcgggttntgangttgccgcncacggnaacgaactacgccgtctgggaganagccggcgccgaacaagtgactcgagcataatagagtgctcgagataccgatttnnttctcagtacaatgtacacgggactgcattgataaaataagtggtttctcctctaataagtaagggagcgtaaaagggcaattggagccagcatatgtnacctnaaaatantg

SEQ ID NO: 5450 - DNA, 250 bp, Zea mays
  misc_feature: Incyte ID No: 700457060H1
  unsure 46, 54: a, t, c, g, or other
gcacgcctcctcctctttcagcaaacacagctagctagcagcaccngctccacntcgcctgtaatcatggcgtattgctgcgacgacggctgcaactgcccccctgactgcgggtgcccatgcgactgctgcaatttgtaccctgaagtggagaccgccgccgccagcggcatcctcgctgcgccgaccaccaaggccagcgccggcggctgcaacacctgcaagtgcggcggcaccagtgcaactgcaa

SEQ ID NO: 5451 - DNA, 267 bp, Zea mays
  misc_feature: Incyte ID No: 700457061H1
  unsure 30, 66, 79, 140, 257, 264: a, t, c, g, or other
gtaacgcagaagaggcaaacgggcagcganctagatctcgcgtccccgctgcgactgtgaagccancgtgcgtcagatncggacaaggcgccggagcctcagcaatccctgagcagactagaggagtagctaaggcaaanggaggtggcaaagatgctgccgacgaccgcgtccaaggggcgcggggcctcccgctccgccccgccgctcttcggtccctacctccgccgcatcgtcaagtggcaacaaatggattngaatacnctt

SEQ ID NO: 5452 - DNA, 264 bp, Zea mays
  misc_feature: Incyte ID No: 700457062H1
  unsure 254: a, t, c, g, or other
atagtgttgcctcgacaaatcgccgggcttcatcaccatacacggagagaaaaaaaacggggcccccatctactgtaaaccccgccgtggtggccgttcgaagcatgcagcaggggtaggatgtaccacgtgcacgtgaggctcgtgcttggtgaaaccgcgggatgcgctccgccgccgcgtctggccatgggggaaaagttagagcttgcgcagagaatggaggaaggatgtgacgaggtccgccgtggatnttttcgtcca

SEQ ID NO: 5453 - DNA, 267 bp, Zea mays
  misc_feature: Incyte ID No: 700457063H1
  unsure 182: a, t, c, g, or other
atagtgttgcctcgacaaatcgccgggcttcatcaccatacacggagagaaaaaaaacggggcccccatctactgtaaaccccgccgtggtggccgttcgaagcatgcagcaggggtaggatgtaccacgtgcacgtgaggctcgtgcttggtgaaaccgcgggatgcgctccgccgccgcntctggccatgggggaaaagttagagcttgcgcagagaatggaggaaggatgtgacgaggtccgccgtggactgattttcgtccac

SEQ ID NO: 5454 - DNA, 268 bp, Zea mays
  misc_feature: Incyte ID No: 700457064H1
  unsure 46, 168: a, t, c, g, or other
cttgtgaccctccctcagccgcgtcgcgtcgcatcctacgatccanagctctctctgctcgcagccatggcgaagaactacccgaccgtgagcgccgagtacagcgaggctgtggagaaggccaggcgcaagtccgagctctcatcgccgagaagagctgcgccccgntcatgctccgcctcgcgtggcactccgcggggacgttcgacgtgtcgtcgaggaccggcggtccattcggcacgatgaagcatcagtcggaattggctca

SEQ ID NO: 5455 - DNA, 103 bp, Zea mays
  misc_feature: Incyte ID No: 700457067H1
  unsure 2, 16, 22, 37, 40, 71-72, 76, 84-85, 94, 102: a, t, c, g, or other
cngtagggtagcttcncgtgtnggtaattatatggtntgnaccatcaccttttggctctacatggtatganngtangatactannttccaactnaataaatna

SEQ ID NO: 5456 - DNA, 263 bp, Zea mays
  misc_feature: Incyte ID No: 700457069H1
  unsure 8-9, 13, 19, 31-33, 40-41, 46-47, 81, 156, 201, 225, 233: a, t, c, g, or other
atttcaannaacnatgggntcatggtgcatnnnccattgnncaacnncttagatgctgttaatgctatcaaaccaacagtnttgattggcacatccgggaaggggcaaactttcacaaaagacgttgttgaagcatctcctcatttaacgagagancaatcattcttgccctatcgaacccaacatcacaatctgaatgcncagctgagcaagcttacacatggngcaagggncaagcagtgtttgcgactgggagtccattg

SEQ ID NO: 5457 - DNA, 259 bp, Zea mays
  misc_feature: Incyte ID No: 700457070H1
  unsure 61, 137, 177: a, t, c, g, or other
cgcctccgctccgcccacggttccactccaactctccgatctccaggaatccgcggctgangcgccggcgatggcggctcccatggtcgacgccgaatacctgcgccaggtcgacagggcgcgccgccacctcgcgncctcatctccaacaagggatgcgccccgatcatgctccgnctcgcatggcatgatgctggaacttatgacctgaagacaaaaactggtggtgcaaatggttcgattagatagaagaagagta

SEQ ID NO: 5458 - DNA, 268 bp, Zea mays
  misc_feature: Incyte ID No: 700457072H1
  unsure 96, 188: a, t, c, g, or other
cccattttcgacaagcaatccattttcaacaaacaatccatttgctcctaagcctgctccaactattacttcaccattcaacacctcatttaacantgcatcagttacaagttcgagcccattcacatcatcccctagtaccacaatgtttgggcaaacaggtgtttctacactttcagcaagtaatncgccatcattgtttggaaataccaatccagctcctgttacatcatcatatttgccacatcagtgacaaaaatccaagtcc

SEQ ID NO: 5459 - DNA, 265 bp, Zea mays
  misc_feature: Incyte ID No: 700457073H1
  unsure 2, 112, 114, 122, 182, 223, 247: a, t, c, g, or other
cngacatcgtctcttcgtccccacgagcaaccgataatccgccggcgctgagatgttggtttatcaagacctcctatctggcgacgagctcctgtcggattcattcacctancnggaggtcnagaacggcgtcctgtgggaggtcgagggaaagtgggtcacccaaggtcctgttgatgtanacattggtgccaatccatccgccgagggtggtgaggatganagcgttgatgacacagccgtgaangtggttgatattgttgac

SEQ ID NO: 5460 - DNA, 253 bp, Zea mays
  misc_feature: Incyte ID No: 700457074H1
  unsure 36, 52, 77, 152, 194, 213, 251: a, t, c, g, or other
ctcgcctcgggatcccgccgccgctccatctgcctntgctcccccacccgcnactcagcgagcgacaggtcggcganggatggccaaggccaggtcgttggcgaacagaagcaggcgcagcaatcagacggcggcggcggccacgcgctgtnctccaagctcgcccggtacctcgacccggaggcctccttggncaaggaccaactgctggangcggtgcatggatccgccaggcggtggggtcatatgcngc

SEQ ID NO: 5461 - DNA, 226 bp, Zea mays
  misc_feature: Incyte ID No: 700457075H1
  unsure 38, 44, 47, 49, 51, 67-68, 79, 90, 93, 101-102, 105, 107, 131, 160, 166,170, 188, 191, 194, 202, 204, 206-207, 210: a, t, c, g, or other
agaaccctaaacccgcatcccgaacatagacgcaggcnatctcngcngncnccgccatgttcgggannccatccatcantcccgctttcnggncactcctnnagnancccggtttttggcacgcgatccgncacgtcccgcatttggtgtcgacgatcgnacaccncggncttcggcaccatctcgtngangcntggcttcngnanncantcgtggactcccgttt

SEQ ID NO: 5462 - DNA, 260 bp, Zea mays
  misc_feature: Incyte ID No: 700457076H1
  unsure 41, 63, 66, 75, 79, 93-94, 96, 107-108, 117, 124, 159, 162, 166, 175,180-181, 183, 192, 198, 200, 207, 224, 227, 249, 252, 254: a, t, c, g, or other
gtttcgggagtgcgcggtgagacggcatgacaacgcggggngctaagcgcgcggccacctccnacnccgccgcanccgntttaccaagtaagnnantaatggacggnncctcttttnatgttcncagggcggagtctcccatcagacatgtgatgacanganccgntagtttagntcctnngngggcggaanctgctngnaaacatntgagggcacttaatagncantttgcaagctgggttcattgcnatncnaaatca

SEQ ID NO: 5463 - DNA, 267 bp, Zea mays
  misc_feature: Incyte ID No: 700457077H1
  unsure 2, 9, 41, 101-102, 193, 201, 205-206, 225: a, t, c, g, or other
gnaagctanaggagaaggtaaacaacgcggtgctgttcgancaggctacctacgacaagctgctctcggaggtgcccaagtagaagcaaatcaccccttannatcctctccgagcgtctgaggatcaacggcttcccttgctcggagggccatcaaggacttgatggcgcgtggcctcattcggatggtcccngtccactnaagnnagcagatctacaccagggnaaccaatacataagggtggggaagaggtctaaaatgcattgt

SEQ ID NO: 5464 - DNA, 241 bp, Zea mays
  misc_feature: Incyte ID No: 700457078H1
  unsure 4-5, 25, 42, 62, 157: a, t, c, g, or other
gcanncgatgcggtcgtgctcacanacgcctgcgaccggacngccacactggagcggctacnttcgttctggcttcccgagctccggcgacttcagttgaaggctccagttatctggtggggtgcaagctggacctgagggacgaacagcaggttanccttgaacaggttatggcgcccatcatgcagtccttccgcgagattgagacatgcatgagtgctccgctcttcggcagatccag

SEQ ID NO: 5465 - DNA, 266 bp, Zea mays
  misc_feature: Incyte ID No: 700457079H1
  unsure 9, 161, 173, 175-176, 178-179, 181: a, t, c, g, or other
tttagaggncccactagtgtctttgaaggatgttgagcagcatggtccaactcctactaaggactttgttgtacctaacacagaagaccaacaagaagccagagatatcagcttgcaggtacaagctgtggattccatgaaagattgtggcgaagtaccanatggacacaatngnnanncncgacgaatgatgatgaattagaactgggtacttctgcagatgtagaaaagaatgatcaacctaccttgctgggaccaagatcgga

SEQ ID NO: 5466 - DNA, 264 bp, Zea mays
  misc_feature: Incyte ID No: 700457080H1
  unsure 2: a, t, c, g, or other
cngccttgtaatcgagaaggatagtttcccgcatgataccctggaaattgttgcgtggacagatgatgggttgatcatggctgctcgccacaggatatacaaacatattcagggcgtgcagttccatccggagagcatcataactactgaagggaggctcatggtcaacaattttatcaagattattgaaggctacgaagcctcgaattgctctccgtgatttatctagttggaagcagcagcagccctgcgtggggcgggtga

SEQ ID NO: 5467 - DNA, 259 bp, Zea mays
  misc_feature: Incyte ID No: 700457081H1
  unsure 9, 24, 56, 69, 81-82, 90, 102, 109, 169, 171, 199, 222: a, t, c, g, or other
gcaattcanttttttcccgttcancggagaaagaatggcgctgccgacagctaacncgggcttccgtcncggctgccaggnntctcccgngatgggattgangtcggcnccgcggttggcactgcgtcgtccggcgcggtctccgggcacaggagtaggactggcagangnaagtttccagtggcatccacaagtctanatgactatcttccaatggcgaanaccgaagtgaaaaatcggacattaatgtgatatcaca

SEQ ID NO: 5468 - DNA, 260 bp, Zea mays
  misc_feature: Incyte ID No: 700457082H1
  unsure 60, 73, 128, 257: a, t, c, g, or other
gtttgacctcacggagaattcaccaataatgacaaggcagagatctgaagtgaacaatanattgatgtctggncacaatatggacacaagggccgcaaaaaagctgagaacagacagatttggcaggnctttggttcggcagtccaaatgtcatgcaaacaacagcagttgttctgaagttagcttatcaggcctcaacaacaatggaaaaggattgactgtgatatcttggatagtgatcaaactggagaagctanttg

SEQ ID NO: 5469 - DNA, 260 bp, Zea mays
  misc_feature: Incyte ID No: 700457083H1
  unsure 2, 27: a, t, c, g, or other
cnggaaaccttaggatcttcaaggctncacctgctggactacgacgccatggcagctgcggtcgtcgggtgccagggggttttccatgtggccactcctgtgccttcggaggacctgactgacccagagctacaaatgctgggtcctgctgttaccggcaccacgaatgtgctcaaagctgcctccagcgcgaacgtccagcgagtggtggtggtgtcgtccatggttgccgtcgagatcagccccaaagatggcctgaa

SEQ ID NO: 5470 - DNA, 262 bp, Zea mays
  misc_feature: Incyte ID No: 700457084H1
  unsure 179-180, 182: a, t, c, g, or other
ttaaacagctgacgaaaaggaccccgcttagactcggagcgactgctgggttgagacttatcggagaggagcaatcagagcagattctcgaagcagtcaggaaccttatccacattaagagcaaatttcagtacaagcccgagtggatcaatgttattgagggatctcaagaaggatcnncncctatgggttgctctgaattatctgttggataaattgggaggggactactcacagacagtagctgtgcttgacatgggcg

SEQ ID NO: 5471 - DNA, 257 bp, Zea mays
  misc_feature: Incyte ID No: 700457085H1
gggaaagctagcggctttaaagaaaatgagggatcatccagtagcgctggggaatcatccagtatggacattgacaaagctgagtcttctctaccaaagaaacaattaactggcgtctatgatttggttgctgtcttgacacacaagggaagaagtgcagactctggccactatgttggctgggtaaagcaagatgacggaaaatggatcgagtttgatgatgacaacccaaacatccgcaagaggagacttttgaa

SEQ ID NO: 5472 - DNA, 237 bp, Zea mays
  misc_feature: Incyte ID No: 700457088H1
cgccgctcggggattgcctgctttcctctgccgaccacatctacaccgcacaactggtccttccaagtgagcttcaatcccctgcgtgtagatggagagggttctcaaggatgacgccgtcgaggagaagggcgaccgcgccagaatggcatcgtttgttggggccatggcaatctcggatttggcgaagaccacattgggtccaaaaggaatggacaagatcctgcaatcaactgg

SEQ ID NO: 5473 - DNA, 259 bp, Zea mays
  misc_feature: Incyte ID No: 700457090H1
  unsure 2, 155-156, 159, 161, 164-167, 169, 171-172, 177-178, 200, 205, 209,216, 237, 248, 254: a, t, c, g, or other
gnggtgctgtaccagggcatcacttgttgttctatgcccccttccctactagattttcttttctaccctgggcctggagagatgtttctgtcatgactgtcattgtggatctcgcgatattgttatattgaagctttgtgcttgttcaagaaaannaananaannnntngnngaaanntaaggtacagaatccaaaaaangcggnctgnagagaanaagatgaccatcataggcganatggatgcagntgcgantacca

SEQ ID NO: 5474 - DNA, 257 bp, Zea mays
  misc_feature: Incyte ID No: 700457092H1
  unsure 3-4, 9, 65, 185-186: a, t, c, g, or other
gtnnaccantacagagctctggagatccaggtcctagaactgctgacccttccggcctaatttancctccaatagcaccgattggttctgatgatctctaccctgggcctggtgcaggcttctaccctcacagtggcattgggagcggtggcagcatgcatgttggtcctaatgatccgcgctcnntccttctaatcccttctctgccccattggtgggctgggagtgttccaccaggtagtcgctagatccaatgg

SEQ ID NO: 5475 - DNA, 262 bp, Zea mays
  misc_feature: Incyte ID No: 700457093H1
  unsure 24, 62, 106, 161: a, t, c, g, or other
gtccagcgtcggagatctccgccncccatggagacgctggccagcgccatgcggcgcgaganccgccggttccaaggccccgccctcctcctctgcttcctccgcnctcgcctcgggcagggtccctctcgtcatggccttcctctcctgcctcgcctggntctacgtcgccggccgtttgtggcaggacgcgcagacccgggcgatcctgttccggcctcctcgagaagagtctaccagcgtcccgaagtgctctcggtgg

SEQ ID NO: 5476 - DNA, 281 bp, Zea mays
  misc_feature: Incyte ID No: 700457094H1
  unsure 2, 6, 31, 73, 130, 179, 183-184, 209-210, 262: a, t, c, g, or other
gnagangtattttctgaccttgaagcaagtnaatatcagatggctgagtatcggatatctatttatgggaggnagaaaagcgaatgggaccaaatgggcaagttggatagtgaacaatgaattatatagngagatgttgtttggttaatttcagatttccttcgggatattacaatgtnatcnncggggagatggggcacaatacaatnnctttcccaaaaacctcccttggacaatatttttctccctcttttatgaagtnaactgttgaacccaggctt

SEQ ID NO: 5477 - DNA, 260 bp, Zea mays
  misc_feature: Incyte ID No: 700457095H1
  unsure 33, 45, 74-100, 143, 212: a, t, c, g, or other
ttagctggtctttggccttcttcagcgaccgcnagctcgcgagangattattgtaaatatacgacgatgatcgnnnnnnnnnnnnnnnnnnnnnnnnnnngatgacgacgcagaaggcgatgatgcggaaggcggtgatgcanaagacgatgatgaagttgatgaggagaatgtcaaaggtcgagatgaaggtgataatgatactgccgaanctgccaacggttctgctgatgatgctgaaaaggagacaattgattccg

SEQ ID NO: 5478 - DNA, 285 bp, Zea mays
  misc_feature: Incyte ID No: 700457104H1
  unsure 20, 30, 51, 59, 62, 148, 152-153, 155, 159, 175: a, t, c, g, or other
ccttctccgatggccgcgcncgtgtcgcanccgccggtgtccgccagggcntccacacngtntctcccccgcgggataggcgcgctcccggagtccgctcccacgtccctccggttatccgtcggccgccgtcgccgggccgccagcntagnngngaangcatcgggaaatgtgntcgggaactacttccaggttgcaacctatggcgaatcccatggagggggtgttggttgcgttatcagtggctgcccacccagaattcctctcactgaggcagacatgcaa

SEQ ID NO: 5479 - DNA, 285 bp, Zea mays
  misc_feature: Incyte ID No: 700457106H1
  unsure 72: a, t, c, g, or other
agcagctattgtggtcgtccctcagccgcgtcgcaccgcatcgcattctacgattcgaagctctctctgctncgcagccatggcgaagaattacccaaccgtgagcgccgagtacagcgaggccgtcgagaaggccaggcgcaagtccgcgccctcatcgccgagaagagctgcgcgcccctcatgctccgcctcgcgtggcactccgcggggacgttcgacgtgtcgtcgaggaccggcggtcccttcggtactatgaagtgcccggcggaatggctcacggcg

SEQ ID NO: 5480 - DNA, 284 bp, Zea mays
  misc_feature: Incyte ID No: 700457107H1
gcattttctcaataccttgaacaactaagcaagtccaatgtctcatgcccagccccttcgtttacaggcccagtggaaacacgtcgatattcaggataaccaagccaatgctatgaaggaaccaggaaccagtggtgggtatggctccccaatgaaagatgacaagaacaaggatgtggatacaatagcttcgaacttcatcaagcttaagcacagggcttgggcactccagaagagcacaaccatgtaccaaccttccacttaaaggtgttgctagttcaata

SEQ ID NO: 5481 - DNA, 282 bp, Zea mays
  misc_feature: Incyte ID No: 700457111H1
  unsure 2: a, t, c, g, or other
gncaaaacctgtgccatacttgacatttgatgaggcagctgaacttggcctattttggagcgcaggttttgcatccacaatcaatgcggccagctagagaaggcgatgtacctgtgagggttaagaattcttataaccgtcgagcccctggtacccttatcactaaagcaagagatatgagtaagactgttttgactagcattgttttgaaatcaaatattacaagcttgatatagtcagcacacgcatgcttggccagtacggttttctagctaaggtttt

SEQ ID NO: 5482 - DNA, 148 bp, Zea mays
  misc_feature: Incyte ID No: 700457115H1
tggtgctgtaccagggcatcacttgttgttctatgcccccttccctactagattttcttttctaccctgggcctggagagatgtttctgtcatgactgtcattgtggatctcgcgatattgttatattgaagcttttgtgcttgttca

SEQ ID NO: 5483 - DNA, 288 bp, Zea mays
  misc_feature: Incyte ID No: 700457116H1
  unsure 32: a, t, c, g, or other
ggaaccccagggttcagaagaagctgcaagangagctcgaccgtgtggttggccgtgaccgcgtcatgctggagaccgacttccagaacctcccctacctacaggccgttgtcaaggaatcactccggctgcacccgccgacgccgctcatgctcccgcacaaggccagctcgaacgtcaagataggaggttacaacatccccaagggcgccaacgtgatggtgaacgtgtgggcggtggcgcgtgatcccaaggtctggagcaacccgctggagtacagaccggagc

SEQ ID NO: 5484 - DNA, 275 bp, Zea mays
  misc_feature: Incyte ID No: 700457118H1
  unsure 59: a, t, c, g, or other
cgggattaattccgggtatggttttgtctgcactggaacggtgaggtcactgttaaganaattagctgagattagtcattgatatatttctattccattcactgagtcatgtctatacttttaacttttagctacatattcaaagggaagtcaccttatacattgaagcatgggagacccgatcatgaagcaacagacacggccaatctgcatgcgcctattcaatatcctaaaccagatggacatataacatttgatgtcccaacatctttata

SEQ ID NO: 5485 - DNA, 281 bp, Zea mays
  misc_feature: Incyte ID No: 700457120H1
  unsure 140: a, t, c, g, or other
ggtcagattggcgtttcccgtgttcttcttcctcgcagcggcggagttcgcggcggggacgcggtcgccgtcggctttcgtacaaaacgccatctactccaaccgcatcaccatcttctccaagacttactgcccctacnccatgcgtgctaagcacatatttcgagaccttaaggaagatccatatgttgttgaactagatacccgagatacagtaaatgcgctttcaaatgggacagctccagaaattctcgggaagagtcagtcacaatgatgggtcg

SEQ ID NO: 5486 - DNA, 283 bp, Zea mays
  misc_feature: Incyte ID No: 700457121H1
  unsure 103-129, 280: a, t, c, g, or other
tgcagatttccaccccaagggagtgtggcagctctcccacagatcctacccaaaccacaatctcgccgcggtctccaatgggagccgagccggtggacttctnnnnnnnnnnnnnnnnnnnnnnnnnnntttcgccggagccggagatctccggcaaggacagaggagggaactggaaggcggacatgatgtcagctctcggggagtcggtttccttcggccgcttcctctcggagccgctcgaatgggggaagaggtccgccttcgcgcacaaccgctnacc

SEQ ID NO: 5487 - DNA, 274 bp, Zea mays
  misc_feature: Incyte ID No: 700457122H1
  unsure 6, 51: a, t, c, g, or other
caagtntccttcctccatcttcctcctccactccacttcccaagtccccantcacccccaaccccgtctctccactgcggcgcaggcttcgcttcggctccgctcggctcgagcagaagaaaatgcaacgggcagtgcaggccgtcaggtcacacggcaatgttcttaaatatgctgttctacaacacatcagcgctcccaagccagcaatgcttcctgctgccttttctcgtttcatgtcagtttcatctgctcgcctagaggatcgtggatt

SEQ ID NO: 5488 - DNA, 279 bp, Zea mays
  misc_feature: Incyte ID No: 700457123H1
ctcaacctccagcccaacctccagcccggaatcgagagcaatggcgctcgccaaggccaaggagatcgttgcctccgctcccctcgtcgtcttcagcaaaacttcctgtcctttctgcgtccgtgtgaagcagttgttcgagaagctcggagcaagctacaaggccattgagttggataaggaaagtgatggagctgagctccagaatgccctgaaggagtggactggacagaggactgtcccaaatgtcttcatcatgggaagcatattggcggctgt

SEQ ID NO: 5489 - DNA, 284 bp, Zea mays
  misc_feature: Incyte ID No: 700457124H1
  unsure 14, 29: a, t, c, g, or other
gaacgccgccagcngctttctccgcgaanttcaccccccagcaggtcaaggatctcaaggagcaaccaggtgttctccaggttgtgccgagccagacttaccagctacatggtcctgggtctggcactcaccagggcacgacacacaccttgggccttatgtgaaggcgtatgagaatcaagaagactgtgtttagtatggctgtatggcacaggtctgacgaatgtgtatagtacagtactatgtaagaataagggacgtatcgtctatatactgctttgcgc

SEQ ID NO: 5490 - DNA, 266 bp, Zea mays
  misc_feature: Incyte ID No: 700457127H1
  unsure 2, 36, 62: a, t, c, g, or other
cnctcccccggttccccttctctgctcgccatcttntgcctctccgcttggctcgtacaatncacctcctacgctccacacgccgccggcgaactacaactgcttctgccgtggttacagagaagaagggtttggggagaagacaacctaaatcaattggatctgggagtatcagatctaaaaagtcaggttttcatcaaggtagaaaaagaaacttttctgtacggtatggctttcccaactgcagcagctgttttgcttaatga

SEQ ID NO: 5491 - DNA, 281 bp, Zea mays
  misc_feature: Incyte ID No: 700457128H1
  unsure 2, 81, 273: a, t, c, g, or other
cnacaaagccatcagtggcagcaattgatggtcttgctcttggtggaggtttagaagttgccatggcatgccatgcacggnttgcaactccaacagctcaattaggtcttccagaacttcagttaggaattattccaggatttggaggaacacagcgactcccacgactggttggtctgacaaaatctttggaaatgatgctgttatctaagccaatcaaggcggtgaggcacaccaactgggcctggttgatgccttagtttctcctaatgntttggtgg

SEQ ID NO: 5492 - DNA, 282 bp, Zea mays
  misc_feature: Incyte ID No: 700457129H1
gagtttgaatcaaaacaggaggcacatggtgaccaaattttgatcaaggcctcagtcctggctgagttacagaggcggatactaaaagccgaggccacagtacgtgaaaaggatgaagagaacgagatgcttcatcagcggcttcagcaatatgaaaaccgctggttagagtacgagcagaaaatgaaagctatggaggaaatgtggcagaagcaaatgcgttcgctgcaatcgagcctttccgtagcaaagaagagccttgttttggatgaaacgcctagg

SEQ ID NO: 5493 - DNA, 279 bp, Zea mays
  misc_feature: Incyte ID No: 700457130H1
aagatcgacaaggaatatacagatgattacatacaaatttgcaactaccctctccagtgctgcctgctgtttaaatcggatatgcagtgccctggagcagaagtggaacatccaatgaggaacttttgacaagcatgggaatcttgttttattatatacatcttacatgtacttccctctgcttatgtacaatgtttgaaagttaaaaccaaatgtttcagtgtggcatatgacgtgttttagacatcaatcaggctttaaactggtttgttcagagtc

SEQ ID NO: 5494 - DNA, 278 bp, Zea mays
  misc_feature: Incyte ID No: 700457131H1
  unsure 32, 126: a, t, c, g, or other
gatcgcgtgattccgcatcccgttcgcgagcncgacacacgctgacagcttcacggctgaccttcccgagtcccgacggcctccagctccatcttgattcttgaggcgaagcccggtgcgtaagantctgccatggccagcgagaataaggtctttgggttcgaggaagtcgccaagcacaacgtcaccaaggactgctggatcatcatcgccggcaagtgtatgacgtcatccgtttatggatgagcatctggtggagacgaagtttgctaactgta

SEQ ID NO: 5495 - DNA, 285 bp, Zea mays
  misc_feature: Incyte ID No: 700457132H1
  unsure 5, 12, 17-18, 24, 98, 100, 166, 202, 215, 221, 244, 254, 258, 266, 279: a, t, c, g, or other
ggganactatgntgttnntatctncatgttacactgaagtactaccgtatagatcctacagcagctgatgcactagttaatagagggaacacattcananagattggcagagttaatgaagcattcaggattatgttcaggcagcaacaatcaggccaaacatgcnagaagcccatgccaattggcctcaatcatacaaggncagtgggaatgtngaaacngctataattagctaacagcaggntctcggctgngtcntgatttcntgaggcacctgtnatctcc

SEQ ID NO: 5496 - DNA, 282 bp, Zea mays
  misc_feature: Incyte ID No: 700457134H1
atcgcctctcagaaccgagatcctcaaaacccttctcccccctcccggatcgagtgcttgagctccgaccaaatctcgcagcggctgcaattccgagcccgaagagcggatcaggcgaggacgacgccttcgattctgatctgcggtcggcgcgacctagagagaaccggagatgcagcagggcgacggcacggaggcgcaggtgacgtgggaggaccagcagaacatcaaccgcttcggtcgcctcaacaaccgcctccacgagctccaggacgagatcaa

SEQ ID NO: 5497 - DNA, 259 bp, Zea mays
  misc_feature: Incyte ID No: 700457136H1
  unsure 42: a, t, c, g, or other
cttagatcatcatcgtcctgtacgccatggttttcaccagcntctacttcttcgaattgtattggattctgatatggaacagaagaagaagcggctgccccatcttaccagccctttttgtttgccctagtttccccttgtgaaaagggtgttttgttttataaactctacttgcaataagcagagcctttttttaattatgtcagggtgcattgatacgatcgaataatcatcaatccataatgtagcaatttttttt

SEQ ID NO: 5498 - DNA, 278 bp, Zea mays
  misc_feature: Incyte ID No: 700457137H1
  unsure 127: a, t, c, g, or other
taacgctcaagctgcaggagttactgctcattactacgaggatgagactgctcctactggcacatgtgctgtatgtgttgttggtggtgaaaggtcattgattgcaaatctgtcagcggcaaactgntacaaatctgagcatctaaagagaccagagaactgggcactagttgaaaaggcaaaatacatctacattgctggatttttccttacagtgtcgcctgattctatccagctagttgctgagcatgctgcagcaaataacaaggtgttcctga

SEQ ID NO: 5499 - DNA, 280 bp, Zea mays
  misc_feature: Incyte ID No: 700457138H1
  unsure 2, 5, 50: a, t, c, g, or other
cncantattgctgagatggagaatgtccttgccagaacaaagcgtgagtnagagaacaccaagaagtatgccatacagagcttctccaagagcttgttagatgttgcagacaatttgtctcgggcatcatctgttgtcaaggcaagtttctcaaagatagattcatctaacgattctgatgaagctgtaacactactgaaaaccctactagagggtgttgagatgactgagaagcaacttggagaggtcttcaagaagtttggagttgaaaagtttgatc

SEQ ID NO: 5500 - DNA, 277 bp, Zea mays
  misc_feature: Incyte ID No: 700457139H1
gttgatacgagtgacttggagcttaaacctcagggaagactttctgttactgtggtaaaagcaacttctttgagaaataaggagatgatcggtaaatcagacccttatgtgaaactgtatgtgcggccaatgtttaaggtcaaaacaaaagtcatagatgatgacctgaatccggaatggaatgaaacatttgacttgattgtcgaagacaaagaaacccaatctgttattttgaggtttacgacgaagacaaacttcagcaagacaagagactagg

SEQ ID NO: 5501 - DNA, 95 bp, Zea mays
  misc_feature: Incyte ID No: 700457141H1
cttcgtcgatgcttgaattgggaccctttgtccgttttcctagactctgatgctgtatgcaactgaaacaagtaaatctatgatcttaaggctgc

SEQ ID NO: 5502 - DNA, 275 bp, Zea mays
  misc_feature: Incyte ID No: 700457142H1
gctctttatgcatcctcgttacatgcatggagctgctactagcccagaggttaaagtatatgcatatgcggctgcacaagttaagaaagctttggaggtcactcactacctaggtggtgaaaactatgtgttttggggtggaagagagggttaccaaactcttctgaacactgatcttaagagagaacttgaccatttggctaactttcttcaagctgctgttgactacaagaagaagatggatcaacggaacactgttgatagagcctaaacca

SEQ ID NO: 5503 - DNA, 282 bp, Zea mays
  misc_feature: Incyte ID No: 700457144H1
  unsure 2: a, t, c, g, or other
gnaggaaagcatcgcgagttcgccatacggatgggttccaaagcgcctttctgtctcacggctcctgcttgctgctccgccgcggcctgtggacctgctgcacatgcccacgatgctggtaacagattgtgttatgttctcatcagtcatcactctggatttgcaccgttgagttgatttacccacttaggctgtcgatttgcactgtagattacaccgtttgcattgtgagaaataggggatagatatggtagttgctgcagagtggagacagccttgctg

SEQ ID NO: 5504 - DNA, 280 bp, Zea mays
  misc_feature: Incyte ID No: 700457145H1
cgtcgcttccagccgccgccgcgtccgcctcgccaagcgcagcagccgccgcagcacatcgctctcttgatctcagccatggcggaggtggagcagcaacaggacacgccgaagctcttcaaccgctggaccttcgatgatgtccaggtgaacgacatctcgctgaacgactacctcgctgtgaacgcgacgaagcacgcgatgtacctgccgcacaccgcggggcgctactccaagaagcggttccgcaaggcgcatgcccgatcgttgagcgccttac

SEQ ID NO: 5505 - DNA, 285 bp, Zea mays
  misc_feature: Incyte ID No: 700457146H1
  unsure 2, 4, 44, 63, 69, 75, 162, 164, 173, 177, 181, 191, 204, 208, 215, 233,253, 259, 270, 274, 278, 281: a, t, c, g, or other
cntngcttccagccgccgccgcgtgccgcctcgccaagcgcagnagcagccgcaggcacatgngctctnttgatntcagccatggcggaggtggagcagcaacaggacacgccgaagctcttcaaccgctggactttcgatgattgtcagggtgaacgacantntcgttgaancgantacntggttgtgangccgacaaagaantcangtaactngcggttaacggcgggcgntaattcaaagaagcggttcngcaagngcatgcccgancgtngaangcntaaa

SEQ ID NO: 5506 - DNA, 281 bp, Zea mays
  misc_feature: Incyte ID No: 700457147H1
tgcaatgtcatcggtagtccagatgagcaatcttggcctcaaggattgtcacttgcagaagcaatgaagtatcagttcccacagatcaaaggcagtcaactggccgaggtgatgacaacagccagtagcgatgcaattgacctcatctcatcactatgctcatgggatcctagcaagagaccaaaggccgcagaagtcctccagcataccttttttcagggttgtacatgtgttccactccctgtccgtccaaaagcttcatcattcctagaacacctcca

SEQ ID NO: 5507 - DNA, 280 bp, Zea mays
  misc_feature: Incyte ID No: 700457148H1
aagggctatgcggtgccaaaagaacagcaaggcaaagttgtgaaattcgacttccatggaaggccagctgaaataaagcatggcagtgttgttcttgcagcaatatgtagctccacaaacacatcaaatcccagcgtcatgattggtgctggccttgtggcaaagaaagccgcgaattgggcctgaggtgaagccatgggtaaagacaagccttacccctggatctgtggttgctaccgagtacttgaaacatagtggccttcaagattatctgaaccag

SEQ ID NO: 5508 - DNA, 207 bp, Zea mays
  misc_feature: Incyte ID No: 700457149H1
  unsure 4, 9, 42, 62, 108, 135, 139, 149, 156, 158, 163, 165, 173-175, 178, 187,189-190, 193-195, 200, 206: a, t, c, g, or other
atcncgagntattctacaggttgattggttgtgtgctaaatnttatgcggtcacagttgtgnagagctatacctagcaaaaatttgtccctccgccactgccttgtancttgttttatactcagaacctagaacnaccnaaaaaaaagnggggcgncngccgnanatgacgcnnnaangccccgggntnnaannngggcngggaanc

SEQ ID NO: 5509 - DNA, 277 bp, Zea mays
  misc_feature: Incyte ID No: 700457150H1
  unsure 45, 194: a, t, c, g, or other
gggcatatcgaggaggtttttagggtggtggtggtgttgtgaggngctgctgccgctgctctccagtctccaccgatggcgatcaagaacatgacggtggcggcgacgacgcggtcgctggacgcggacatgacggtggacgagttcaaggagtggctgcggcggttcgacacggaccaggacgggcgcatcanccgtcacgagctgcggcgcgccctgcgtgccatccgctcccggttcacggggtggaggagcaggcagggcatcagttacgccg

SEQ ID NO: 5510 - DNA, 276 bp, Zea mays
  misc_feature: Incyte ID No: 700457152H1
  unsure 15: a, t, c, g, or other
ggcttttcatgagtnaaaccaaccgaccaccaatctccatgcgccgccttgtcaagtttatggaaggaaaggagaagaacattgctgtcattgttggcacagtcacagatgacaaaaggatccaggaggttccagcaatgaaggttactgccctgaggttcacggagacagcaagggccaggattgtcaatgctggtggcgagtgcctcacatttgaccagcttgctcttcgtgctccacttggcgagaacacggtcctcttgagggccccaagaa

SEQ ID NO: 5511 - DNA, 276 bp, Zea mays
  misc_feature: Incyte ID No: 700457156H1
gacccagcagctattgtggtcgtccctcagccgcgtcgcaccgcatgcgcattctacgattcgaagctctctctgctcgcagccatggcgaagaattacccaaccgtgagcgccgagtacagcgaggccgtcgagaaggccaggcgcaagtccgcgccctcatcgccgagaagagctgcgcgcccctcatgctccgcctcgcgtggcactccgcggggacgttcgacgtgtcgtcgaggaccggcggtcccttcggtatataaagtgcccggcgga

SEQ ID NO: 5512 - DNA, 275 bp, Zea mays
  misc_feature: Incyte ID No: 700457157H1
  unsure 100, 193: a, t, c, g, or other
gtgttggattgcacacagattgtagcttttcctacatccattcccggctccctggatatttaggcgagtatctggctttaactggtgctagactgaatgngaaggaaatgatttctgctggtcttgctactcattttgtcagttctgaaaaattggaagaacttgaaaaacgtctactggatttggacacagntgctgagtctgcagtccgagctgttattgaagaattttcaacagatgttcaaactgatgaagatagtatattgaataagctt

SEQ ID NO: 5513 - DNA, 276 bp, Zea mays
  misc_feature: Incyte ID No: 700457159H1
  unsure 60, 99, 161, 232, 244: a, t, c, g, or other
ctcggctctcggtgtgggaagggaaccaaaccgagacggaggcggagtacgacgcctgcnttccctcttccgccgagcgcccgctgcgtcattctcgtncctcctcttcatcttcatcggccaaccgattgccgctgaccccggccatcggcgactgtccnccggtttttctttaacgatttccgattcgattccatggccggctggaccgattccaccggcagcggcggcngaggatcaggangaagaggcttcacgacaccccgctatactata

SEQ ID NO: 5514 - DNA, 278 bp, Zea mays
  misc_feature: Incyte ID No: 700457160H1
gtcatcttctccaagtcatactgcccgtactgcaaaagagcaaaggccgtgtttaaggagcttgagttgaagaaagagccatatgttgtggagcttgatcagcgagaggatggctcagagattcaggatgccttacttgagatagttggcaggcgtactgtccctcaagtttttgtccatggaaagcacctgggtggttctgacgatactgttgactcctacgaaagtggaaaactggctagacttctaaacatcggagtcaaggacgacctttggag

SEQ ID NO: 5515 - DNA, 277 bp, Zea mays
  misc_feature: Incyte ID No: 700457162H1
ggagaactgtaatcattatgaggcctacaaaggagaattcaacgtcccatgacggttcagattcggtttcttgtgtatgttttggagaatgcgatcctggaccaacgtgaaggtcaagagaaaatggtatggctgatagacttcacaggatggacaatggcccatgccacacccataaagactgcaagagaatgtacaagcatcctgcaaaatcattaccctgagaggctggccattgcattctgttgaatcccccaaaagtattcgaagcctttac

SEQ ID NO: 5516 - DNA, 281 bp, Zea mays
  misc_feature: Incyte ID No: 700457163H1
  unsure 87, 241, 259, 267: a, t, c, g, or other
ctcctctcctttcctctcctctaggctctagtcctctcgcatccgcagctttccccagccagctagggtttgcagatgacgaccgcngcgcgccccacctgggcgccggccaagggcggcaacgagcaggggggcacccgcatcttcggcccctcccagaagttctcctcccgcgacctcgccgcgcacacctccctcaagccaagaaaagacggtcaacagacccaagaggagttacagnagaggaatcttcagggangaattgangaagtgagcgcaac

SEQ ID NO: 5517 - DNA, 280 bp, Zea mays
  misc_feature: Incyte ID No: 700457164H1
  unsure 2, 40, 50: a, t, c, g, or other
tnaaccgagaccaccaccgctctgcctcgcctcgcctcanctcacctcanctcgccgactagggttttgtaccgccgtggatctcgccgtccccgccatggacgtctcgcacgcgggatcctccgtcgccggcgaggctccgacgaccggggagcaccggatggggactaccatcgtcggggtctgctacgagggcggcgtcgtcctgggcgccgattccaggaccagcactggaatgtatgtagccaaccgtgcttcagacaagatactcaatgacaga

SEQ ID NO: 5518 - DNA, 202 bp, Zea mays
  misc_feature: Incyte ID No: 700457165H1
  unsure 49, 52, 79, 107, 122-123, 146, 149, 152, 154-155, 158-159, 161-162, 166,168, 175, 177, 187, 193, 195, 198-199: a, t, c, g, or other
caccccggcagccgcaaacgccttcgccgtcgcgtcccgctcctccgcncgnccgacgcgacccctaggacctggaganagaggtcggatggctgccgcagtggtcnacgacgtggtatggnncgccgtccagaagcgcctcatgnttnganannganngnntttngntggaccnancaagacaatnttgttngncannagt

SEQ ID NO: 5519 - DNA, 272 bp, Zea mays
  misc_feature: Incyte ID No: 700457166H1
  unsure 2, 35: a, t, c, g, or other
tncaacaagaaggtttattctgtggtgctggaganatgtgactgggtgttttcggtggttcgtatcatggataggtttacttacagcttgatttgttcattatattatatatgtttgcctaatctagttcttttgctgaccttgcgctcatgtaatttgattcattctagtttgcgacagctatacccagcgtgtgaataagttgtgtactcgcgtgatactgtctggtgcctttgatgtgacaatatgaggagcattgtatattttaaaaa

SEQ ID NO: 5520 - DNA, 273 bp, Zea mays
  misc_feature: Incyte ID No: 700457167H1
  unsure 96, 105, 146, 167-168, 170-171, 262: a, t, c, g, or other
ttcgctctcgcaagtcgccaagccaccgatttgtttacaggcgccggagctcccgacgacgactgagccatgtgcggcggcgcgatccttgccganctccgcganccggcgccgcgccggctcacggagcggggacatctggcagnagaagaagaagcccaagaggnncnncgccggcgggaggcgctcgttcgcggcggaagacgatgaggacttcgaggccgacttcgaggactttgaagccgatccggtgattcggatnggagctcgggg

SEQ ID NO: 5521 - DNA, 273 bp, Zea mays
  misc_feature: Incyte ID No: 700457173H1
caccccggcagccgcaaacgccttcgccgtcgcgtcccgctcctccgcccgcccgacgcgacccctaggacctggagagagaggtcggcatggctgccgcagtggtcgacgacgctggtatggacgccgtccagaagcgcctcatgttcgaagacgaatgcattttggtggacgagcaggacaatgttgttggccatgagtcaaagtacaactgccatttgatggaaaagattgattctgagaatctgctacatagggcattcagtgtgttcc

SEQ ID NO: 5522 - DNA, 272 bp, Zea mays
  misc_feature: Incyte ID No: 700457174H1
  unsure 103-129, 140: a, t, c, g, or other
tgcagatttccaccccaagggagtgtggcagctctcccacagatcctacccaaaccacaatctcgccgcggtctccaatgggagccgagccggtggacttctnnnnnnnnnnnnnnnnnnnnnnnnnnntttcgccgganccggagatctccggcaaggacagaggagggaactggaaggcggacatgatgtcagctctcggggagtcggtttccttcggccgcttcctctcggagccgctcgaatgggggaagaggtccgccttcgcgcac

SEQ ID NO: 5523 - DNA, 274 bp, Zea mays
  misc_feature: Incyte ID No: 700457178H1
  unsure 78, 168, 181, 208-209: a, t, c, g, or other
tccgctagggtttatctgctcgaggaatggcgtcggtgcaggtctccggcgcgggggtcggtgccgcggccttctcantgaaggggaaggcctccaccggtgcgctccggcttcgctctacgttgaccttcggcgaggtctgcccggcgcggcgggcgttccgcggcntcgtcgtcagggnccgctaccgtcgtcgcccccaagtacnnaacattaagccttggctggatagagtgcttgtaaagattaactcttccgaggagaagacaatggt

SEQ ID NO: 5524 - DNA, 282 bp, Zea mays
  misc_feature: Incyte ID No: 700457180H1
  unsure 2, 34, 123, 187: a, t, c, g, or other
tngcattcttgcctgttcttaattattgccaggncaggagaaacaaagatgaggcctcagctgatacttcgtcggcactctggctgttctcgccatcctcgcagctctcggcgaaggctcgtncgtcctggccctgctgcaacaactgcggtgcttgcaacaagaagcagccgccggagtgccagtncaatgacgtgtcggtcaacgggtgccatccggagtgcatgaactgcgtcaaggtcggtgcaggaattcgtcccggcatgggcaatggccccgtcg

SEQ ID NO: 5525 - DNA, 274 bp, Zea mays
  misc_feature: Incyte ID No: 700457181H1
  unsure 27: a, t, c, g, or other
atcgacgagtgtgactgtgagcaaganagaaggagaaaccttcttcgctgtagtaaagaagaggctcccgccattccgaggctgcttattattagcacccgcttaggcatttccttctcttattattaccataggattgagctgtttattttctgcaccagtgattgtagcaatgggttaagcaaaacaaaaacctgcaaggctgattattgtagggctgcaggggatggtgtcgtgcaacttattgtgttgttacgctgtactagcagcaacc

SEQ ID NO: 5526 - DNA, 264 bp, Zea mays
  misc_feature: Incyte ID No: 700457186H1
  unsure 240: a, t, c, g, or other
ttttcaatacacctaccctggatatattggagatgaatgtcttattggtaactggtttgggaagaagagtgtccaggaggaaagaagtgcagccatttcactagctgacaagatgattgagtctttaaaatttcaggctgttctggttcgcatttatgaaggaaaggaacccactgaatttttcccaatatttcaaaacttggttatatacaagggagggacaagtactgggtataaganatttgtctcagaaaatggcattga

SEQ ID NO: 5527 - DNA, 215 bp, Zea mays
  misc_feature: Incyte ID No: 700457189H1
  unsure 32, 34, 40: a, t, c, g, or other
cgtctccactctccagtctccagcactgctcngngcgcgncggatcgagggagggcaggcggacgaggaggagagatgagtctcttcgggcttggacgaaaccagaagacattccgccccaagaagagcgcttcatcaggtagcaagggagcacagctccgaaagcacatagatgccactctcggcagtggaaaccttagggaagctgtgaggtt

SEQ ID NO: 5528 - DNA, 272 bp, Zea mays
  misc_feature: Incyte ID No: 700457192H1
  unsure 85: a, t, c, g, or other
cggcgcctccacttcgcgttctcgcctcatctcctcccgctcaggatccggcggcgaaggtaaggcaagatgtacaccgcgaggnagaagatccagaaggataagggccttgagccctccgagttcgaggactccgtcgcccaggctttcttcgacctggagaacggtaaccaggagctcaagagcgacctcaaggacctttacatcaacggtgctatccagctggatgttgccgggagcaggaaggctgttgtgatccacgtcccataccg

SEQ ID NO: 5529 - DNA, 274 bp, Zea mays
  misc_feature: Incyte ID No: 700457194H1
  unsure 86, 172: a, t, c, g, or other
caccaagaaggcagcggccgttgaccctgtggaaccggagaaggttctcaaggcggccggcgaggtcggcgcctacgtcgactgcnttctcaccacccatcaccactgggatcatgctggtggcaatgagaagatgaggctgcaggtgccagggataaaggtatttggaggntccctggacaatgtgaaaggctgcactgatcaggtggagaatggaatgaagttgtcacttgggaaggacttgagatactatgcctacacacgccttgccaca

SEQ ID NO: 5530 - DNA, 277 bp, Zea mays
  misc_feature: Incyte ID No: 700457196H1
  unsure 164: a, t, c, g, or other
ggatttgtgttcgttagtcattccatgtgccctgacaaccttagatcattggtcaccagaagttaaggtacagggaatggtaagctttgtacacatagcgaagaatgtgaaagcaacggaattaagtttgtatgaagatgccatacttgatgcgtgctgtcagnacattcctgcagatgatgagttatggtaccaggttattgaggtatctgtgatgttgctgacattcacccagcggagcaatcctcgtagcccctggtatgatcgaatgcttagt

SEQ ID NO: 5531 - DNA, 286 bp, Zea mays
  misc_feature: Incyte ID No: 700457202H1
ccgacgtatgagaaggtggcttctgttttcaagttggatgaaggagttgttattgctaaccttgacgctgacaaacacagggatttggctgagaagtatggagttagtggatttcctaccttgaagtttttcccaaagggaaacaaagctggtgaagattatgatggtgatagggacttggttgacttgtcaagttcattaacgagaagagtggtaccagccgtgacacaaagggtcaactaacctcagaggctggccgtatagcaatctggatgtcctggctaag

SEQ ID NO: 5532 - DNA, 290 bp, Zea mays
  misc_feature: Incyte ID No: 700457203H1
ggcaaaaaaataaataaatcgaagtctagtggatggttctggcatgtggaattgtggattgttaatttcgacatacatactactatccaaactccaaaggttaaagaaaatttccgtagtgatccaaggtacaaagccatgaagcatgaagaaagggagactatatttaatgaatacatagtggaactaaaatctgctgaacaggaagcagagcaagctgccaaggccaaagtggatgagcaagccaagttaaaggagagggaacgtgaaacacgtaaaaggaaagaaag

SEQ ID NO: 5533 - DNA, 286 bp, Zea mays
  misc_feature: Incyte ID No: 700457204H1
cgccgccccgctctccgtcatgaaaatggtgatccagacaaagagcgtggagtacatgcccctgttcctgtcgctggcttccctcgtgaatggcatctgctggactgcttacgcgctcatccgcttcgacctctacattactatccccaacgggctgggcgtgctgttcgcggtggcgcagtggtgctgtacgccatctactacaagtccacccaggagatcatcgaggcgcgcaacgcaaggccgaccagatcgccatgaccggggtggtcgtcgacggcggcaa

SEQ ID NO: 5534 - DNA, 289 bp, Zea mays
  misc_feature: Incyte ID No: 700457208H1
ctttgccaatttcctggggcatcttcatctttgtcttggatattgcgtaccacttcgtgatggcagacccgaagtacgaaggaaactgatgtcctctagtgcaaagatcctattatctgcaggccgaaatagggctatactgttagctaatgctagtgagatcgcttgacactttgagtgcatatcatggaagctggacatgcagttcctggcattttggttttgcccatgttttaatctgctgaattagtaaatcctggagaatcaaaagcgttttcaagtactgcag

SEQ ID NO: 5535 - DNA, 288 bp, Zea mays
  misc_feature: Incyte ID No: 700457209H1
caatcccgagcagtggtgcgaaacctcgagcgctcgcgccggtgaccataacaaagaggaagccgcggtagcactggtagcggcagcagtaagggggagatgtcgtcggcgttcagcggcgatgagaccgcccctttcttcggcttccttggcgcctccgctgcgctcgtcttctcatgcatgggggcggcgtacgggacagccaagagtggcgtcggcgtggcgtccatgggtgtcatgcgcccagagctcgtcatgaagtccatcgtgcccgtggtcatggctggt

SEQ ID NO: 5536 - DNA, 286 bp, Zea mays
  misc_feature: Incyte ID No: 700457210H1
ggagtaatgcaaatggaggttttcagaatgtcttgtccgtcatcaatgatgtacaatatggctctgtaaaggataatggtgaatatgaaaccaaatcggtggctcctttgtctgggttttacactgatacgagggaaacggttaacacaaatggtctagctacgcaaacattctctggacctggctcagctgttaatcttcagcaagtggggaagcgcaattctattgaatctcctaatgctgcaatttggctggcaaggcagagaatgatagcaatggctatata

SEQ ID NO: 5537 - DNA, 288 bp, Zea mays
  misc_feature: Incyte ID No: 700457211H1
  unsure 57, 106: a, t, c, g, or other
ctccatgctgggccgggtggaggaggagaccaaacgcctggccttcatccgccaggngctggagctcatggccgaccccacgcgccgggaggtcgacgccatcagntagcgcatcgacaaggtcaacaggcagctcaagccgctcggcaagacgtgcctcaaaaaggagaaggagtacaagatgtgcctcgaggcctacaacgagaagaacaacgagaaagccacgctggtcaataggctgttggagctcgtaagcgagagcgagaggctgcggatgaagaagctgga

SEQ ID NO: 5538 - DNA, 286 bp, Zea mays
  misc_feature: Incyte ID No: 700457213H1
  unsure 65, 246, 275: a, t, c, g, or other
ctattacctttctgctcgtggtgagtgctgacaccacctcacgcacacaagccgccggcggcganccagaccgaccacctcgcgcactagccttgctcgcttctccgtcgccggctcgttgccggctcgtcggcacgatgtcgtcggagcctccacccgccccttctgccgccgcagcagagggactggctgctgacctttccgccgccaccctcagcaagaagcagcagaagaaggacgccaggnaggcggagaaggctgagaaggcggcgcangccagcaaaca

SEQ ID NO: 5539 - DNA, 280 bp, Zea mays
  misc_feature: Incyte ID No: 700457214H1
gttggatcaatatgtatgcagattagatgtatatagtaataattaaaatatactcatcgatttgcatacgccttctctacagttatgcacttatgctccaagccttgttccgttcaagtttgcttcacatagtaaaacatgtctccctttcacttgaacctaaactgttggatatgcagtttagttccttcgtgttcacatttgtctaaagttatggtttgttgtaaagagtgacttgcaaagatgcatgccccctgccatcttctttttggttaggcac

SEQ ID NO: 5540 - DNA, 287 bp, Zea mays
  misc_feature: Incyte ID No: 700457215H1
  unsure 32, 53, 55, 65-66, 72-73, 110: a, t, c, g, or other
ctattacctttctgctcgtggtgagtgctganaccacctcacgcacacaagcngncggcggcganncagaanngaccacctcgcgcactagccttgctacgcttctcgtngccggcttcgttgccggctcgtcggcacgatgtccgtcggagcctccacccgccccttctgccgccgcagcagagggactggctgctgacctttccgccgccaccctcagcaagaagcagcagaagaaggacgccaggaaggcggagaaggctgagaaggcggcgcaggccagcaac

SEQ ID NO: 5541 - DNA, 288 bp, Zea mays
  misc_feature: Incyte ID No: 700457217H1
cacaagcatagtgcaggggcttgccacctaagtaaggcccgcctgagagccatggcatccaaggccgtcctcttcttggctctcaacctcctgttcttcacggtggccaacgcctgcggcaactgcccgaccccaacgcccccggtcgagccaccgccgccgcctcctgctgctaccccacccccttcgtccagcggcaagtgcccgctgaacgcgctcaagttcggcgtgtgcgccgatgtgctcggcctcgtcaaaggcgaggttggcaaggtgcctgccgagcca

SEQ ID NO: 5542 - DNA, 287 bp, Zea mays
  misc_feature: Incyte ID No: 700457218H1
  unsure 62: a, t, c, g, or other
gctttccttcgagtgccatggccgatccggcggaggagaacgttgtctcgccgccaccgacncctgcggccccagccgtgggcgcctcagacccgcccctgcagcctgctgctgacagcgcctcaacggagaaggtgtctgctccggcgccggaggtaaggtcccggggattcaggcttcttggagaggacacttccgtgcacaaatcccttgggggcggtaaaactgctgacgttctcttatggaaagacaagaaaacttctgctgttgtaataggcggcgcaact

SEQ ID NO: 5543 - DNA, 285 bp, Zea mays
  misc_feature: Incyte ID No: 700457220H1
  unsure 190: a, t, c, g, or other
ggaccatgaacatcatcctcagcctcttcgggaaccggggcgaggttgaactgatggagagatggtacgagaagttccgaggctacggggtcgagccggagacccgcacgctgaacatcctgattggcgcctacgggaagcggcggatgtatgacaagatgtccgcagtcatggagcacatgcgcaagtncgcgttcccgtggacgaccgcgacgtacaacaacgtgatcgaagcatttgctgaggccggcgacgccggaacatggagcacgcgttcaaccagat

SEQ ID NO: 5544 - DNA, 284 bp, Zea mays
  misc_feature: Incyte ID No: 700457222H1
  unsure 46: a, t, c, g, or other
ggcggctgcgacgacgccgacgacgggccctctccagcacctatancatcctgcaatgccagaaggtcagcgacttcctcatcgccgcggcctacttctccatcccgctcgagctgctctacttcgccacctgctccgacctcttccccctcaaatggatcgtgctgcagttcggcgccttcagcgtgctctgcggcctcacgcacctcatcactgtgttcacctacgagccgcactccttccacctcgtactcgctcttaccgtcgccaagttcctgacggca

SEQ ID NO: 5545 - DNA, 286 bp, Zea mays
  misc_feature: Incyte ID No: 700457223H1
  unsure 150: a, t, c, g, or other
cgccgtcatctcattctccctcgcaccgacgaggtcaggtcagagaccttcgagtactactagtcatggcccgcatctagaaggcagcaagaaagggggcggatggggcgcgcgttcgtgtacgtgatcctgggcggcggcgtggccgcnggctacgccgcgctcgagttcgcccgccgcggtgggtactcccgcggagagctctgcatcatctccgaagaggccgttgctccttatgaacgtcctgcactaagcaaaggctatttactcccagaaggtgctgctc

SEQ ID NO: 5546 - DNA, 267 bp, Zea mays
  misc_feature: Incyte ID No: 700457225H1
cgtccgccatcggcgctctcttgcaggcaatttcatggctagcaattgcactttggcaagatatctctcttcaagttcttaccatttttctcctcttgagcaactttggtgcttccatatgtgaggttgccaatgatgccattgtagcggagtctgggaagaaagcggcctcttcctcaggatcaggtcagcttcaatcgtttgcttggatgttcggctcttctgctggtgctttaggaaacctcctaggtggcattgctctcagct

SEQ ID NO: 5547 - DNA, 277 bp, Zea mays
  misc_feature: Incyte ID No: 700457230H1
  unsure 13, 28, 95, 159-179: a, t, c, g, or other
caggacgcgagcnacgacggcgccaggntcgtggtgctagtcgcgggttctcccgtcgattccgcctccgattccctccctcctcccgttgcggngactcctgctcctgcggcggaggccaagcaggagtcggtgtcggagacggaggaaactaagcannnnnnnnnnnnnnnnnnnnnaccagcaacagcggcaggaggtgtgcaggccatggcggtcaccgtagtgcgggactcgagacgggcctggacgcgagcaccagcgaccgggacgtgac

SEQ ID NO: 5548 - DNA, 77 bp, Zea mays
  misc_feature: Incyte ID No: 700457231H1
  unsure 22, 72-74: a, t, c, g, or other
cacactcccaagcagctgcttnctttcctttccttttttcttgcctgctggctgctgctttcttctaacttnnncca

SEQ ID NO: 5549 - DNA, 286 bp, Zea mays
  misc_feature: Incyte ID No: 700457236H1
ggcaaggacatgacccaggatacaacctttgagtttgagaggaagaggaacaggcccgagcgctacgaccgcaatttgacggagcagaccctgaaggctatcccgcttattacaaagattaggcatgatcgtatggaaaaacacatctcaaacagacataaacctggtaaacgcaaggagatggaaaaggattccaaggagctggagcaggacatcgccatgctcccgaagaagcttattagcaaccatcttgcggctgagaaaacgaaggtcaaggttgaagttg

SEQ ID NO: 5550 - DNA, 284 bp, Zea mays
  misc_feature: Incyte ID No: 700457239H1
ggatctttgggattcgatacaaaacaacgagtacttctcttctgaaggactatgggatgttttcaaacagctacggatttacaagacccctgacatagaaacaccaaattaccttattctaaagaggactgcacattatgaggttaggagttatgcgccattcttagtggttgaagcaaaaggtgataaactgacaggatcgtcgggcttcaacaatgtaaccggatatatatttggcaataatgcttcatctgaaaagattccgatgactacacctgtcttca

SEQ ID NO: 5551 - DNA, 262 bp, Zea mays
  misc_feature: Incyte ID No: 700457240H1
  unsure 38: a, t, c, g, or other
tggttacttcaggtcactcactgaagtgatcatcacgngcacttaaatccgcctactctataacggcagcaagagtagaaggtctcactggtgtttgggttggggaccgtaaagttgcggcgatagggatccacggttctcggatgatagtttatcacgggctcgcactaaacataacaactgaccttgctccattcagaatgattgatcctgcggcataaaggaccgcggtgtggggagcataaggagatactacaaaggg

SEQ ID NO: 5552 - DNA, 285 bp, Zea mays
  misc_feature: Incyte ID No: 700457241H1
  unsure 32: a, t, c, g, or other
cagctgcatcaggggcacaggatcaggcaganaccgaccacatggctagcggatgctacagatcagcagaaactacggcgaattttacaaataatgctatgtctcagtcccaacctcaatggaccggtccgtcccctgtggatgactgtgcagtgaacagtgagacgcttaacaaccagcagttggtgattgatgaaggaacaatcagagtgtccagtaactattcccaagagttgcttaactcgttgactcatgcccttcaaagctcaggtgtagatttgtccc

SEQ ID NO: 5553 - DNA, 283 bp, Zea mays
  misc_feature: Incyte ID No: 700457242H1
gcagggctgctgctgtgaaagaaaccgaatccagtagcagcaagataagcatcgggcccaaaccaaaacagatcaaggaggatgacgaggatgctaacctggtataccaagggccaatatcatcgaccataaagaaagtgaagcttctctccctgtccacctgctgcctctccgtgtcgctggggccagtggtaacattcatgacttcgcctgacatgaatgtgatcctcaagggagcggttgcatccaccgtcatttcctcagcgccactacgactgcagcg

SEQ ID NO: 5554 - DNA, 262 bp, Zea mays
  misc_feature: Incyte ID No: 700457243H1
  unsure 41-42: a, t, c, g, or other
cttagatcatcatcgtcctgtacgccatggttttcaccagnntctacttcttcgaattgtattggattctgatatggaacagaagaagaagcggctgccccatcttaccagccctttttgtttgccctagtttccccttgtgaaaagggtgttttgttttataaactctacttgcaataagcagagcctttttttaattatgtcagggtgcatttgatacgatcgaataatcatcaatccataattgtagcaattttttttt

SEQ ID NO: 5555 - DNA, 283 bp, Zea mays
  misc_feature: Incyte ID No: 700457244H1
  unsure 50, 93-94: a, t, c, g, or other
cggcgaggagggcaggaagaccgaagaccgagccgtgcgggggctcgggnacgggaacgggacaggacctcaaaatctcagatccttcctgcnncgcccgcccgtgcccgtcgacgcgtcgttcatgccggccgcgccccacctccgccctctcctcctccagggggatcggatacgccacaggctgcgcgatggtgctgtgggtcttcggctacggctccctcatctggaaccccggcttcgacttcgacgacaaaatcctcggcttcatcaagggctacaa

SEQ ID NO: 5556 - DNA, 278 bp, Zea mays
  misc_feature: Incyte ID No: 700457245H1
ttgacttgttgattgatagattatctgctttagttagatttggaggggcatcatctgattggatccttcctttacattcactgcttggaccctctgatcaaaggaaagtgttccagtctccaccagataacttccgcaaggttattattgccacagacatagcagagaccagcattacaattgatgatgtagtatatgtagttgatactggaaagcacaaggagaaccgttataatccacacaagaaaatgtcaagcatagtagaagattggatttct

SEQ ID NO: 5557 - DNA, 262 bp, Zea mays
  misc_feature: Incyte ID No: 700457246H1
  unsure 53: a, t, c, g, or other
cgccgattatctccatcaaagcagcgcatcccgctgcacccttactcatcctnacccgctgctcgaaggagagccaaatccagagcgccgccgcgatggcctcccctgacgcggaacagccggcgccgacggaactcgagcggtggcgtgacctcgacatgctcttgtcccgccctggaaacctcgtggaggccactttcgatcccagccccggcctgcgagacctactggggagcctcgtggaggttttggttgtgggcgc

SEQ ID NO: 5558 - DNA, 271 bp, Zea mays
  misc_feature: Incyte ID No: 700457247H1
  unsure 265: a, t, c, g, or other
aggaagcttggtattaaatactgctacaacagaccatgtgctctgtatgctgctcctgatcctttcggacaagaagctgagaaatcattaactgagggcaataagggtgaaactacaactatgatcaaattaacagcaaacctgagcagtgcctttttcccacggttcagtccggatgggaagtatctgtcttcatctcagcgagagtgctgtagatagtggggccacaatgccaccaattcatgcatagatcgatggtgtaagngggaaa

SEQ ID NO: 5559 - DNA, 255 bp, Zea mays
  misc_feature: Incyte ID No: 700457248H1
  unsure 23, 38, 40, 57-58, 93, 117: a, t, c, g, or other
ctcgagcggcagcaagaccatantcctggcatattcanancatttcatttctttcannttctcatgtcacacctgtttcatctgttgattgcnccaaatggtctactgtttgttgcngagagctgtttgcatttggttgaactggttcatgggaagcgattgaatgcacaaaagttttcaattggagggactccaaggaaagtgctataccataatgaaagcagaacactgttggtactgagaatgggctaatgg

SEQ ID NO: 5560 - DNA, 283 bp, Zea mays
  misc_feature: Incyte ID No: 700457250H1
  unsure 40, 267: a, t, c, g, or other
gctgaattgtcatcaggaaagctggagatggaagcgaggnggaattaaagaggacaataaacgcctgatgcagcggtagagcctaccgtctgtaaccggaaggtcccgggttcgagccccagcctctgcatattatgcgggtaacgcttggcgcttaaagatacccttccccagaccccgcacagtgcgggaagcctacgacactggaaagcagaaaaccatacaggcaatgacaggttgtgcgaggggttgtgtattgtgtgagangctgccgcggacgtgt

SEQ ID NO: 5561 - DNA, 285 bp, Zea mays
  misc_feature: Incyte ID No: 700457251H1
  unsure 173, 194: a, t, c, g, or other
ggacgaggaaggcatgccggcgttcgcgctcgtcaacaaggccacggggctcgccatcaagcactccctcggccagtcccacccggtcaagctcgcgcctttcaacccggaccaggaggacgcgtcggtgctgtggacggagagcaaggacgtgggcaagggcttccgctgcntccgcatggtcaacaacatcngcctcaacttcgacgccttccacggcgacaaggcccaacggcggcgtccatgacggtaccgagatcgtgctctggaagtggtgcgagggcg

SEQ ID NO: 5562 - DNA, 281 bp, Zea mays
  misc_feature: Incyte ID No: 700457252H1
gttggagttggatcctgagcgtgtcatttcccatggacaagcgacattattagagaagcaaagattaatagatgattgtttggagaaatcctatgaaatttccctgggatgtggccagtttgggagttgtctggctgttgatgctgatgctatttcaaatttgagaagcgaacttggaaatcaactagctagcaagagccgtgattttaatctaaggggtattggggctgttgtatacaaagttcctgagttgaataatgaccagatactgaaagtaagtc

SEQ ID NO: 5563 - DNA, 280 bp, Zea mays
  misc_feature: Incyte ID No: 700457253H1
ctgagatcctgtcttcgaccacggactcacgctttgcgaggcagctgggcatccctgccctcgggttttctccgatgaccaggacgccgatactgctacatgaccataacgagtttctggaagacagagtgttcctgaggggcatccaagtgtacgaacatgtcatcagagcactaagctcgttccaaggctgattcgtaaaaacaaaaagaagaaggaaaagtgttgttgcgtggagtgtaacatagctggatccccaatctcatctgctgaatgaagg

SEQ ID NO: 5564 - DNA, 279 bp, Zea mays
  misc_feature: Incyte ID No: 700457254H1
tggaactgtttttcagtaacaaactgatatgattacaacaattcatctttgggaaaatttccctgcaaactttgtttgggtttcttcaaaatttgcactaggccaacatcatgaggttttttattttcagtatccttattgtgcggatgcaccattttttgttatcacacctttcacaagctcggcaattgtctgaataatttctgtgtctaatgatggaactgtttttcagtaacaaactgatatgattacaacaattcatctttgggaaaattccct

SEQ ID NO: 5565 - DNA, 281 bp, Zea mays
  misc_feature: Incyte ID No: 700457255H1
tggaactgtttttcagtaacaaactgatatgattacaacaattcatctttgggaaaatttccctgcaaactttgtttgggtttcttcaaaatttgcactaggccaacatcatgaggttttttattttcagtatccttattgtgcggatgcaccattttttgttatcacacctttcacaagctcggcaattgtctgaataatttctgtgtctaatgatggaactgtttttcagtaacaaactgatatgattacaacaattcatctttgggaaaattccctgc

SEQ ID NO: 5566 - DNA, 285 bp, Zea mays
  misc_feature: Incyte ID No: 700457256H1
  unsure 38-39, 41, 43, 91, 227: a, t, c, g, or other
cgctgagaacaagcaatataatggagttgtgaatgagnngntncaaggagatggagcctcttcggaacagcttgggcaagtttcgtgaggnaaacaatgccatgagagcacagagtgcaggtttatgctcttctatcgaagaccttgacctaacgatcaagatgctgaatgatcgcatcgtacatgagagcatacctttatctgaggagaagcgtctggtgaaaganattaaagaccttgaaaaaaccagatcgaaagtcatctctaatgctgctaacagggcta

SEQ ID NO: 5567 - DNA, 281 bp, Zea mays
  misc_feature: Incyte ID No: 700457257H1
gcctgatgtcgccatgactcttgctgtggttgccctctttgccgatggcccgacagccatcagagacggtaaaacattctcagccctacaaccatgcctcttctacatcactacttgacaagactaaaaactattggctcgttggcagtggcttcctggagagtaaaggagaccgagaggatggttgcgatccggacggagctaaccaaggtaaggctacatacttcacatgtctcacgtcgtctttccatagctcgctgcctcttagcggcttgcctgcg

SEQ ID NO: 5568 - DNA, 280 bp, Zea mays
  misc_feature: Incyte ID No: 700457258H1
ggaccttgcttcaatggacagaaaatttgctgaacattataatgtcttggagcaaattcttgctgtgcttatacagtttgttaaagacaagaaattggagcatcagcaccaatttgatgatctgaagaagacctggcttatcaaaaggtgtcggacaatgaatgctaaactaagctatttggagcatcatctattgcgtgacacttacaacaaggacacagtaccagcactgcacaggatcaggaagtatcttgtagaggccacaaaagaagcatccaat

SEQ ID NO: 5569 - DNA, 278 bp, Zea mays
  misc_feature: Incyte ID No: 700457259H1
catgtggatcttgaacctgtgcaaactgaaaggccaggagaattgacagcatattacaagattgctaaacattataagtgggccttggacaacctattcattaaacataattttgctcgagtaatcattctagaagatgacatggagattgccccggattttttcgactacttcgaggctgcagctaaactacttgataatgacaagacgattatggctgtttcgtcttggaatgacaatgggcagaagcagtttgttaacgacccaaaagctcttta

SEQ ID NO: 5570 - DNA, 280 bp, Zea mays
  misc_feature: Incyte ID No: 700457260H1
  unsure 197, 199: a, t, c, g, or other
ggaccttgcttcaatggacagaaaatttgctgaacattataatgtcttggagcaaattcttgctgtgcttatacagtttgttaaagacaagaaattggagcatcagcaccaatttgatgatctgaagaagacctggcttatcaaaaggtgtcggacaatgaatgctaaactaagctatttggagcatcatctattgngngacacttacaacaaggacacagtaccagcactgcacaggatcaggaagtatcttgtagaggccacaaaagaagcatccatt

SEQ ID NO: 5571 - DNA, 278 bp, Zea mays
  misc_feature: Incyte ID No: 700457264H1
  unsure 73, 76, 121: a, t, c, g, or other
catcctcaattcacactgagaaacctccaaaagacattcttaaagtgcaaaacatgtttcctctaccaatcgncgntcaagctactcccaggtgtttatctctgtgggtataattctgaanactcatatggggcaacatcgtacctggtaattcatccacaaggaaacatactgattgacagcccaaggtatactccaaagctggccaacaatattgaaaagcttggtggagcgcgctacatgtttttgacccacattgatgacgtagcagatcacag

SEQ ID NO: 5572 - DNA, 283 bp, Zea mays
  misc_feature: Incyte ID No: 700457265H1
  unsure 52: a, t, c, g, or other
aatcaatgttatgattggaatcatagttaagaagtctaacgaggacttgatngcacctgaaaggaataacagcgacatataggatgacgagtaaacttccagtcaggcattctccatatgtatcagggattttacatccgttgaaggtgtttcttgaaggggaccgtatacgctatctatcagaagatgataaaactaagttgtgtcgtgggtctacagataagattactgcaatttactatgacttggtctctgaagttgtcactgtggcaaggaaaaccga

SEQ ID NO: 5573 - DNA, 282 bp, Zea mays
  misc_feature: Incyte ID No: 700457266H1
  unsure 2, 159: a, t, c, g, or other
cnccttctcactgcctgtccaggcgccgccgcttcgccgctgcccgtttcttcgaaccactccgaagctgccccgccatggacagctccgccactgacggcgcgaggctaccgccgccaagggccgggagtcgcctctgcgtcaggtgcggtgagaggnaggccgcgctgaagcggcccaaaaccctagaacagatctgtagggaatgcttctatatcatctttgaggacgaaattcatcaaactattgtccagaattctctgtttaaagctggtgagcgtg

SEQ ID NO: 5574 - DNA, 282 bp, Zea mays
  misc_feature: Incyte ID No: 700457269H1
  unsure 16, 20, 22, 24, 51, 55, 78, 87-88, 112, 114, 124, 169, 211, 215, 219,239, 250, 266, 271, 273, 276: a, t, c, g, or other
agtagatctgcatctncganananggcagcgggggtggtgatgatggaganccanccgctgcaggccccgacggccanggctccggnncccggatctggcggagccagccgnanctccgccggncgtcacccccggcaaggagttcacgcgcacctgcaaaggcctcgncgtcgtgctcatcggaggatacgtgctgatctagctcgtccnttcntcantcaactacctcgacatcatnccctccaaganaatccctatgtatggnccgtntntancgctgg

SEQ ID NO: 5575 - DNA, 282 bp, Zea mays
  misc_feature: Incyte ID No: 700457271H1
agaagacaacccgtcagcccctctcgtttttcatccgccttcgcctccaaccgcgtgcgctccacgcctcctccaggaaagcgagagcttctgcataagaacaacaaatcaaaagcgtgatcagctcggtgccaacaaaacctcaacaaccaagtttcatgtctgatctcgacgtccagcttccatctgcctttgatccgtttgctgaggcaaatgctgaggactctggtgctggtcctggaacgaaggattatgtgcatgtgcgcatccagcagcgcaacg

SEQ ID NO: 5576 - DNA, 280 bp, Zea mays
  misc_feature: Incyte ID No: 700457272H1
ccacaagcatcaccaggttcgcgacttgctcgtgaactttggcaagtttgatcccaagcgcctggagagctcggagccggatgatatcctcaaacccaccgtgcagtgtgacgagatattccggtacaggaacaaaatggagttctcgtttgggacgaagagatgggtgcaaaaagagttgaaggacaagggtgaggaggtggaggtgaagcaggaaacgaatgaaactgatggatatgcgcttggactgcacgcaccagggttcttcgacaaggtgcta

SEQ ID NO: 5577 - DNA, 278 bp, Zea mays
  misc_feature: Incyte ID No: 700457273H1
  unsure 6, 26, 32-33, 35, 39, 53, 104, 111, 118-119, 127, 133-134, 136, 139: a, t, c, g, or other
gcgganttgcgagaactagagaagantcatannanaganaatactgcagtcanccctccggaggaacaacgtccaaagaaagcaaggattcagatgttttcccntgcgganggggtgnnagataatntaatanncncgntgagtatgcgaagtctggtcgctctacctgcaagggctgcagtgagaatattgccaaaggtgccctccgccttggtgcctcttttcctgatccccgtggctacgaaaatactaaatggtaccatgttgtgtgcttcctt

SEQ ID NO: 5578 - DNA, 280 bp, Zea mays
  misc_feature: Incyte ID No: 700457274H1
  unsure 66, 169, 261: a, t, c, g, or other
gggagaagatgtagtccacccacttaaagtttctctggaagatctttacaatggcacctcaaagangctctctctttccgcgcaatgtcatctgctccaagtgcaagggcaagggctcgaagtctggtgcctcaatgaggtgccctggttgccaggggtcaggcatganagtcactattcgtcagctgggcccttccatgatacagcagatgcagcagccttgcaatgagtgcaaggggactggagagagcatcaatgagnaggaccgctgcccagggtg

SEQ ID NO: 5579 - DNA, 277 bp, Zea mays
  misc_feature: Incyte ID No: 700457275H1
  unsure 24, 134, 234-238: a, t, c, g, or other
ggcatacgaagtattatttgaggnttgcattgtatctgaagacagataaagtattatttgaggtttgtattgtatctaaagaaagtgaaatttattgataaatgcagcatgctatatacattgcatgactcatntgcatctgaagttttgtcgtgacctatggtctgaccgtaccggtacaacttagcatcgtacgttgcccgagaaggggtacgatgcagattcataccctcnnnnngtatgaaggcagaggacatatgcattgcattcatatgca

SEQ ID NO: 5580 - DNA, 272 bp, Zea mays
  misc_feature: Incyte ID No: 700457279H1
caattattgagatggctatgaccattgtggagcaaagtggcgggcaataccacgtcctattgataattgcagatgggcaggttacgaggagtgtagatactgcatctggacagctgagttcgcaagagcaaaaaactgttgatgccattgtgaaggccagtgaattgcctttgtccattgtgttagtaggagttggtgatggcccctgggacatgatgaaggaatttgatgacaacattctgctcgagcttttgacaattccatttgtaaat

SEQ ID NO: 5581 - DNA, 278 bp, Zea mays
  misc_feature: Incyte ID No: 700457284H1
  unsure 2: a, t, c, g, or other
anaagatactgcagcgagagtcttaccaccgctgcctccaccacctagtttgccacctttacctccaaggcctccaatgcaatctgatatgctagctcctggagtcatgagatttccaccacctccgccaccaccagattcaaggccatcgcttatggcggctggagttaacaggccccctccacctcctccaggatttccaccgtctcaaatgccaatgccaccgtatggtgtgctccctggtccgccgccgatgcttaggcctccattttgccagg

SEQ ID NO: 5582 - DNA, 277 bp, Zea mays
  misc_feature: Incyte ID No: 700457285H1
ccgcatgttcatcacacggacggagtgggcgactgaatggggcggcgccaagcagaaggacgtcggcacaccgttcaagcgcctccccttctactgttgctcgctcacgtttcttccattcgaggatccagtgtgcaccgtcgatggaagcgtctttgatttaatgagcataatcccataccttaaaaagtttgggtagcatccagtaaccggagcaccactcaagcacgaagatctgattcctctcacattccacaagaactcagatggagagttt

SEQ ID NO: 5583 - DNA, 278 bp, Zea mays
  misc_feature: Incyte ID No: 700457286H1
  unsure 2, 31: a, t, c, g, or other
anagaagtattttctgaccttgaagcaagtnaatatcagatggctgagtatcggatatctatttatgggaggaagaaaagcgaatgggaccaaatggcaagttggatagtgaacaatgaattatatagcgagaatgttgtttggttaattcagattcctcggatatacaatgtatacagggagatgggcacaatcaattctttccaaaacctccttgacaatatttttctccctctttatgaagtaactgttgacccagcttcacatcctcagctccc

SEQ ID NO: 5584 - DNA, 280 bp, Zea mays
  misc_feature: Incyte ID No: 700457287H1
  unsure 62-88: a, t, c, g, or other
gctaattaaggccggtcgtcatccctcttctagctcgttttattatccatggcggaggagannnnnnnnnnnnnnnnnnnnnnnnnnnataagaaggacgaggagcaggaggagcagctcgccggcggcgggtacggcgagtccgccgagtacacggaggccacggtgacggaggtggtgtccacgggcgagaacgagtacgacgagtacaaggaggagaagcagcataagcacaagcagcacctcggcgaggccggcgccatcgccgccggcgccttcg

SEQ ID NO: 5585 - DNA, 278 bp, Zea mays
  misc_feature: Incyte ID No: 700457289H1
  unsure 2: a, t, c, g, or other
anaaaataagcacttacacaattggccctttccaaacctccaacggagagaaggccaaactgaaagtgaaagtgcgtctcaacatccatgggaccgttacagttgattcggtgataatgctggaggaggatgtggaagttccagtctcatctgcaaatgaagctccaaacgatactatgaagatggacacagatgatgtgccaagtgatcctgctgctggatctgatgtgactatgcaggagcagcctcctgcagctggaaatggagcacaagataat

SEQ ID NO: 5586 - DNA, 277 bp, Zea mays
  misc_feature: Incyte ID No: 700457290H1
  unsure 178: a, t, c, g, or other
gtcaatttgcagtccggggagagattgtcacacgtgctcagaaactgcaacaagaactgcagagaaatccagagtcgcttccttttgatgagatactctactgtaacattggaaatccccattccattggccaacagccagttacctatttcagagaagttctatctttatgtgagantccagctctcctggacaaaagtgaaacgcatgctttatacaggtcagatgctatagagagagcacggaaaattctagacaaaataccaggaagagctac

SEQ ID NO: 5587 - DNA, 276 bp, Zea mays
  misc_feature: Incyte ID No: 700457291H1
tctcctcccacccgcaaccgcagggagagaaaggggaagcccgccgccgccccggcccccagcaaccagcagatcgggacctctgttctgcgcaatccatccatggcggaggaatcaggccgtcccttgccaaagtttggtgaatgggatgtcaacgatccggcttccgcagacggatttactgtcatattcaacaaagccagagatgagaagaagggtgggaatggtcaagacacagactcaccttccaaggaccccaggactgagagggtggag

SEQ ID NO: 5588 - DNA, 272 bp, Zea mays
  misc_feature: Incyte ID No: 700457293H1
atttcatgtacgaagctccccttggctacaagatcgaggacgttcgcccagccggaggaatcaagaagttccagactgctgcttattccaactgcgtccgccagccatcctgatatcgcctcacatgcaattcgcggtagagtaggattttaattcagttttcctcttgtgtcggtagttttccgttggctctggctgcctcctctgcttctgagattccaacttgtcttgcccatctctcctttcctctctcatcctctctttcttgcaac

SEQ ID NO: 5589 - DNA, 274 bp, Zea mays
  misc_feature: Incyte ID No: 700457294H1
ccgttccatttccccatctcccagatccaattcgcgagttctccctcctctgcctcgactggggcgaggcgggcggccccgacctcatcgtcgacgacggcggcgacgccaacgctgctcatccacgagggtgtcaaggccgaggaggattacgagaagaccggcaagattccgacccggagtccaccgacaacgctgagttcaagatcgtgctcaccatcatccgcgacgggctcaaggctgaccccaagaagtaccgcaagatgaaggagag

SEQ ID NO: 5590 - DNA, 274 bp, Zea mays
  misc_feature: Incyte ID No: 700457295H1
gttgttgagaagtccactgtccctgtcaagaccgctgaggctattgagaagatcttgacccacaacagcaagggcatcaactaccagatcctttccaacccagagttccttgcggagggcactgccattgaggacctgttcaagcctgacagagtgcttatcggtggccgggagacccctgagggcaggaaggccgtccaggctctcaaggatgtgtacgctcactgggttcccgaggacaggatcctcaccaccaacctgtggtctgctgagc

SEQ ID NO: 5591 - DNA, 143 bp, Zea mays
  misc_feature: Incyte ID No: 700457296H1
  unsure 12, 18-19, 41, 47, 72, 81, 107, 112, 138: a, t, c, g, or other
tgagatcctgtnttcgannacggactcacgctttgcgaggnagctgngcatccctgccctgcgggttttctnccgatgacnaggaacgccgatactgctacatgacnataangagtttctggaagacagagtgttccngaggg

SEQ ID NO: 5592 - DNA, 194 bp, Zea mays
  misc_feature: Incyte ID No: 700457301H1
  unsure 71: a, t, c, g, or other
catcaatgttcaagacggggcacttccccaacctgctgcaagacgtgctgcacacgttgggaacctacgtnctgacccttgtatgagacaaggcgagtgtgcgagcttccccgggcttgctactacatcactcgcatccatgtcagggtgatggatgcaggggatagagggttctggactctatcagctcatgt

SEQ ID NO: 5593 - DNA, 267 bp, Zea mays
  misc_feature: Incyte ID No: 700457303H1
  unsure 182-183: a, t, c, g, or other
aacccaaactcttgggcttgtccacgagtgctggtttccctgctggaaagtacctctttgctggtgttgtggatggacgcaacatctgggctgatgatcttgctacatctctcagcactctccagtctcttgaggctgttgttgggaaggacaagcttgtcgtatcaacttcctgctcgctnntgcacaccgctgtggatcttgtgaacgagactaagcttgacagcgagattaagtctggctgcttttgctgcccagaaggttgtt

SEQ ID NO: 5594 - DNA, 94 bp, Zea mays
  misc_feature: Incyte ID No: 700457307H1
  unsure 54: a, t, c, g, or other
ctcgagcgtaaacaggcccagttcctatatgttcctagtaggccctggattatntactgctgcatgctgctactaaagtttgcttttgcttctt

SEQ ID NO: 5595 - DNA, 266 bp, Zea mays
  misc_feature: Incyte ID No: 700457308H1
ctggaggaattgagtaacaaaggcttgatcaaggagagtgagggtgcccgagttatatttattcaaggtcatcaaatccctttgattgttgttaagagtgatggtggcttcaactatgcctcaacagacttaactgctctttggtatcggctcaatgttgagcaggcagagtggatcatatatgttacagatgttggtcagcagcagcactttgacatggttttcagtgctgcaaagatggccggttggctcccagatccaagtga

SEQ ID NO: 5596 - DNA, 264 bp, Zea mays
  misc_feature: Incyte ID No: 700457310H1
  unsure 81, 183: a, t, c, g, or other
gattaattgaggagtccaaggtttcaaggccattaccttggaggccagcgactaatgttttccgtgttaaagaggatgttncgacctatattctgggccaacagaccaaagagctatcttaaaaggacattaggttgggatcagtatccccatggacggtggggtgattctcggaacccatcncatggagcacttactgaccaccagttcacaagaccacgaggccgtggtaagaagctccaagaggaatgggctgttccactg

SEQ ID NO: 5597 - DNA, 166 bp, Zea mays
  misc_feature: Incyte ID No: 700457312H1
  unsure 157: a, t, c, g, or other
aagttggcaagcagagcacacacttgtctgttaagtgtcttttgggttgttggatttaaaaaacaaaagtgcgcgcatctcctcagtgttttctgcaggctgcagtaataaactggtttggtcagttctattgataatgacagcaataataagttcnttattgtgc

SEQ ID NO: 5598 - DNA, 258 bp, Zea mays
  misc_feature: Incyte ID No: 700457314H1
  unsure 53, 131, 164: a, t, c, g, or other
cgctcgagatatcctagggatgtgatccttcattctggccagcacctgaactncactgttatcggagacagtatggagcatgtgtggacatggtcactggttaagtagcaatgggaagatcgtgccacatncaatcgggtaactggtgaagcacaagcacggcngaaggtgtagcggaagtaatcttcaaaggttcaaattttaagctgcaaacaactatcactgttctcaaggtgaaccagatagttgttgatgctc

SEQ ID NO: 5599 - DNA, 264 bp, Zea mays
  misc_feature: Incyte ID No: 700457318H1
  unsure 35, 154: a, t, c, g, or other
ggcacctgcatgtgtacgactggcctggcggtganctcaagcagacacttgatctaggtgacactggactccttccccttgaggtgaggtttttacatgatccatcaaaggacactggctatgttggctgtgctttaacaagcaacatggtgantcttttcaagaccgcggatggatcgtggagccatgaggttgctatctctgtgaaaccactgaaggtccgcaactggatctgccggaaatgccaggatgataatgatttcg

SEQ ID NO: 5600 - DNA, 263 bp, Zea mays
  misc_feature: Incyte ID No: 700457324H1
gagatatgcgtcatgctttgtgctgaccatggtccctgtgtatctggtgctcataactctatagttactgctagggccggaaaggaccttgtttccagcttggtgtctggattattgacgattggtccccgtttcggtggagcaattgatgatgcagcccgatacttcaaagatgcatgtgataggagcctcacgccatacgagtttgttgaaggcatgaaaaagaagggaatccgtgtgcctgggatggtcacaggattaag

SEQ ID NO: 5601 - DNA, 113 bp, Zea mays
  misc_feature: Incyte ID No: 700457325H1
  unsure 23, 28-29, 32, 40, 58, 67, 73, 81, 83, 99: a, t, c, g, or other
ttggtctgcggcaaaagcgagcnctggnngtncatgtttncggcattatgcagcagangcacaagcngctganttaatgcngnaacatgacttccagtntccatttggtcctg

SEQ ID NO: 5602 - DNA, 257 bp, Zea mays
  misc_feature: Incyte ID No: 700457326H1
  unsure 45, 106, 122, 128, 154, 187, 191, 235: a, t, c, g, or other
cttagatcatcatcgtcctgtacgccatggttttcaccagcttcnacttcttcgaattgtattggattctgatatggaacagaagaagaagcggctgccccatctnaccagccctttttgtntgcccnagtttccccttgtgaaaagggtgttntgttttataaactctactgcaataagcagcccntttntaattatgtcagggtgcatttgatacgatcgaataatcatcaanccataatgtagcaatttttttt

SEQ ID NO: 5603 - DNA, 261 bp, Zea mays
  misc_feature: Incyte ID No: 700457328H1
  unsure 169: a, t, c, g, or other
gcatctgcaagctccaccagtcacagccacacggcggaaaaacgaaccgaggaacaatccgggttctgcaggaacccactaccaactgtgcggcgcgttccaaaaatacaaaaggcaagcgagcgagctccaagttcggctgctccaatttcactcggcatggctcctncaggcgtgggtcgtggcggagaacggcgaggacctccaacaacccagggaattcctgccgctctctaagcttgaagatgttggcgtgttgta

SEQ ID NO: 5604 - DNA, 258 bp, Zea mays
  misc_feature: Incyte ID No: 700457330H1
  unsure 219, 255: a, t, c, g, or other
agatggtgcaaaggagattaaagttggtgaggtcattgctataactgtggaagaagagggtgacattgagaagtttaaggattataagccgtcatcttcagctgaacctgtagctcctgctgaatcaaaggctcaaccagaaccttcacaaccaaaggtggaggaaaaaaaaagcttacccaggcttcctgaggttaaggccccaaagattgaagaagntcttcaatctggagatcgcatatttgccagccctcntgc

SEQ ID NO: 5605 - DNA, 258 bp, Zea mays
  misc_feature: Incyte ID No: 700457332H1
  unsure 46, 139, 248: a, t, c, g, or other
gtgacaaggggaaggaggttatggaggaaggaggaagtaagggaangggtaagggtaagggtaaggggaagaaggcttggtcaagaaggaagaaaggggtgaccgtaagttgcagggtttatattcatgtgcaatgcanagactaagaaggagtgctaccagagtcgcttgtttgggatgcctagtgggaagattgaactggtcaagaagattaggccaggggtcaagctgttcctgtatgattttgnacttgaagct

SEQ ID NO: 5606 - DNA, 52 bp, Zea mays
  misc_feature: Incyte ID No: 700457333H1
  unsure 19: a, t, c, g, or other
cataaggtcatgtttgatnccattagttattaatagttagtggatttataac

SEQ ID NO: 5607 - DNA, 116 bp, Zea mays
  misc_feature: Incyte ID No: 700457334H1
  unsure 9, 11-12, 25, 29, 31, 33-34, 37, 39, 59: a, t, c, g, or other
gaattccangnncattcctctcccntcgncntnntcntnctccccctaaggaatacgtncggagaggaatcgcaaagagggccgtctcatccgagttaaggaagccatggagcaca

SEQ ID NO: 5608 - DNA, 261 bp, Zea mays
  misc_feature: Incyte ID No: 700457336H1
tgtgtgtggaactccaagtggagcgctcttattatattcatggggatactttaatgattgcagtgaccgctttctcggacacacgcagtctgtggatacaatgctgaagctggatgaagacactttggtttctggatcatcagatggtgtgatcagattagtgggcatcctacctaataggataaaacagccacttgctgaacattcagaataccccattgaggccctgctttgtcaaacgacaagaaatattaggcagca

SEQ ID NO: 5609 - DNA, 271 bp, Zea mays
  misc_feature: Incyte ID No: 700457337H1
  unsure 7, 18, 27, 154, 163, 177-178, 200, 235, 252, 261: a, t, c, g, or other
gcgatantgactctgacnttcttcgtnccagcgccgaaagagagggagagccaagccgcctcccgccgcgacgcacgatggatcgcgcgcagttgctacctcgtcggactacccggccttgctcttcttctccgacctcactcacatcttacgngccgccgcntgccccacctccgnnagccccatcaccatccctcttnccaccaacatccgcatccgccgcatcatccccatncgcctgcatccccatcngcacccgcngcatcatccc

SEQ ID NO: 5610 - DNA, 263 bp, Zea mays
  misc_feature: Incyte ID No: 700457338H1
cggcaactgcgatgcttgggcggccagagacccttctggggttctctcaccatacaagtttaaccgcaggcagtgcaaagcagcgacgtttcgctgaagatcatatactgcggggtgtgttacggtgacgttatgtggatacagaacaagcacaacgactcagtttatcctctggttcctgggcatgagatagctggggttgtgactgaggttggcgcagacgtcaaggccttcaaggtgggtgaccacgcaggcgttggaac

SEQ ID NO: 5611 - DNA, 49 bp, Zea mays
  misc_feature: Incyte ID No: 700457343H1
catcagtgagtacgtcattagagcttggccgtcaaatacatggtcatag

SEQ ID NO: 5612 - DNA, 261 bp, Zea mays
  misc_feature: Incyte ID No: 700457344H1
ggtgaccaagaaggtgcccgtgctcgtcccacgacggcaagccggtccgcggagtccaccatcatccgtggagtacatcgacgaggtctggaagggcggctaccccattcatgccgggcgacccctacgagcgcgcccaggcgaggttctgggccaggttcgcggaagacaagtgcaacgctgctctgtacccgatcttcaccgcgaccggcgaggcgcaggcaaggcggtgcacgaggcccagcagtgcctcaagaccct

SEQ ID NO: 5613 - DNA, 256 bp, Zea mays
  misc_feature: Incyte ID No: 700457345H1
  unsure 225: a, t, c, g, or other
gtgggcggcgccttcgacggcgcgtccatgaaccccgccgtgtccttcggccccgccctacgtacagctgggagtggggctaccagtgggtgtactgggtcggccccctcatcggcggcggcctcgcggcgtcatctacgagctgctcttcatctcccacacccacgagcagctcccctccaccgactactaaaagccgaagccgaccgacccaggggtgcgcangcaggcagtagcatccagcgctctctccccg

SEQ ID NO: 5614 - DNA, 246 bp, Zea mays
  misc_feature: Incyte ID No: 700457346H1
ggacttctgtgattttatctcaccttctactgaagagcaatcttcacgagcagctgctgtgcaagatgtctctgatgttgtcaaacatatatggccacagtgcaaggtggaagtttttggatctttcaggacaggtctctatctaccaacaagtgatatagatgttgtgatatttgaatccagagttaagactcctcaagttggtctatatgctcttgcaaaagcatatcccagaaaggtgttgct

SEQ ID NO: 5615 - DNA, 257 bp, Zea mays
  misc_feature: Incyte ID No: 700457347H1
  unsure 11, 59: a, t, c, g, or other
gcacgctaggnaggggaagatatgggcgccgaggaggacgccgctgcacgccgcgagcntctccgcgccctaccgtgccgccaaggactcctctccacccccgacggcgccccaaccccttccaccgacggagaacaccaaaatggcaaccatgagatggcagaagagccagaattaccaggtcatcaggatgcacctggtgaggctgctaaagaggatggtagccccactgaggaggccgaagaggttgaagatga

SEQ ID NO: 5616 - DNA, 258 bp, Zea mays
  misc_feature: Incyte ID No: 700457348H1
  unsure 43, 222-223, 226: a, t, c, g, or other
ggagtccattgacatatgtgagattgatcagctggttattgangtgtgcaaagatttcttcccacacttgtctgttggatttcaagatcctcgtgttcaacttcatgtcggcgatgctgtggagttcttgagaaatgctcctgaagggacatatgatgctatcattgttgattcgtcagatccaatagggcctgctcaggaacttgtagagaagcctttttnnttnccacaattgctagagctttgaggcctggaggc

SEQ ID NO: 5617 - DNA, 264 bp, Zea mays
  misc_feature: Incyte ID No: 700457349H1
  unsure 125, 204, 210, 222-223, 246-247, 259, 262-263: a, t, c, g, or other
gtctaatccatcaggcagaggtggtgatggtggtgcacgcatggtgaacctgaacagggttggtagagtttagaagtgataattttcagctcaagtaagcctgaaattctcctaaaagccaagtnctgaatcactgcattttacatagtttcctgttctgggctgagtcatctacctgtttcctacatttcgttgtagcctttnaaattnaggggctaagannttgaactaagagtttggtactgnntgtgggagtgtnacnnt

SEQ ID NO: 5618 - DNA, 269 bp, Zea mays
  misc_feature: Incyte ID No: 700457351H1
  unsure 35: a, t, c, g, or other
gcgatgccgaagaacaagggaaagggaggcaaganccggaagcggggcaagaacgaggcggacgacgagaagcgggagtggtgttacaaggaggacgggcaggagtacgcgcaggtgacgcggatgctgggcaacggccgctgcgaggcgctctgcatcgacggcaccaagcgcctctgccacatccggggcaagatgcacaagaaggtgtggatcgccgccggggacatccgtgctacgtccggcctgcgcgacttaccaggacgaca

SEQ ID NO: 5619 - DNA, 263 bp, Zea mays
  misc_feature: Incyte ID No: 700457352H1
  unsure 16, 21, 35, 40, 57, 63, 73, 76, 91, 114, 126, 132, 135, 139, 152, 164,173, 180, 190, 192, 222, 224, 237, 254-255: a, t, c, g, or other
ggcatctactgcatcntcganccgcggcacgccgngaggnccgcctggaactgcggnccccanatgatctgcngcnacgataccatatacncggacggcacggccaacctcganaccggcgccganttcgcngcngccncgacatcgaccanctcaacgaccgngtacaaggnagctcancgactggctncnctggctcaagtcgtccgacctgggcttcgncncctggcgcctcgncttcgccaaggctactnncccgaggt

SEQ ID NO: 5620 - DNA, 260 bp, Zea mays
  misc_feature: Incyte ID No: 700457353H1
gcaggatctgctctggagcagcttaaaacttatctccatacatcagcaaacgacataccaaggatcattggtgactccatcccaatgaagggacttttttcataacatatgtgatggttgatggttggactggaatagctggtgaaatattgagactgaagccgcttatattcttccatctgaagaactttttcttggtcaaaaccgaaaaggacagagaagaagctatggaccctggcagtatctgctttgactcaatg

SEQ ID NO: 5621 - DNA, 260 bp, Zea mays
  misc_feature: Incyte ID No: 700457354H1
  unsure 195, 197, 259: a, t, c, g, or other
gcgggactgctggctctggctctggcgctggcgccgggccagtgcgggcgttgaccagggagaagggagccgcgccggcgccgggggccaaggccaaggtgcctttccacgatccaagcattccccggccgcaggactatacaaaatcagagtggataactacaagccattcgagcatgtctggctggagcgcangnagacggcacccgacgtgttcacccgctggaaaacctgcctgttgaacagttcgttgacagana

SEQ ID NO: 5622 - DNA, 260 bp, Zea mays
  misc_feature: Incyte ID No: 700457355H1
cgatgatatgatttcctgatctggtgtgcttgcagggatggtgaagcttcaaagttgactgaaaatggcttccaatttcttctgatggaaacaaatgcacaactttggtacataatgagagaatacatttcatctgctgaggaacgtggagtggaccctacggagctgatatcatttctcctggaacttagcttcataaattgggagcggtaaagtgatagtatttgcagaacatcacgttaagcaagtagctatacata

SEQ ID NO: 5623 - DNA, 150 bp, Zea mays
  misc_feature: Incyte ID No: 700457356H1
tttagtttccatatttgacaatttagttactaaagtggaataaattggagggactaaaaattagtctctaaaaccaaacacccccttagtttgttgtggtaataattcctgtatcaattatgtcataaataaaagctagggaaccttgat

SEQ ID NO: 5624 - DNA, 253 bp, Zea mays
  misc_feature: Incyte ID No: 700457360H1
cgaggaagagatgcgcaggaagcaagctcacgctgcccaggaggcgtacgaggaggacgacgagatgccgggcggagcagacgagtgcagtgcgcgcaacagtaagcagactatcatcaaggcaattgggaggggtggtgcccttaaagcatgggagtgatctctggttttgctgtcgccgagctgggaaataggaagctgaatcgacctcgcaagcggggaatgtatccttttttgctgcaacataaaaatg

SEQ ID NO: 5625 - DNA, 254 bp, Zea mays
  misc_feature: Incyte ID No: 700457361H1
  unsure 155: a, t, c, g, or other
gcaccaatcaatctttccgatcgtcttaatcaggttctccgttgggctcttgggtcagtggaaattctgcttagtagacattgtcctatctggtatggttacaatggacgattgaagcttttggagaggctggcttacatcaacactattgtatntccaatcacatccattccgcttattgcctattgtgtgcttcccgctatctgcctccttaccaataaatttatcattcctgagattagcaattatgctgg

SEQ ID NO: 5626 - DNA, 253 bp, Zea mays
  misc_feature: Incyte ID No: 700457362H1
gcggttgttgaggttgctgcccagcactttgttggcgatgatcgcaagtggagctttcttgctgttacagaagcagtgaaagcaggtgtcaggttagctgcttttcgggagagtggatacaagatgctcttacaaggaggggaggtggtaaatgaagaagaggtgaccgttctgaaaataattatggagtaaatggtaatggagtaccagccatctatccgatggatggacatgcagaaaatggtcacaaaac

SEQ ID NO: 5627 - DNA, 256 bp, Zea mays
  misc_feature: Incyte ID No: 700457363H1
  unsure 177, 219, 224-225, 231, 234, 244: a, t, c, g, or other
ggttaacggcaacttctgcattgaacagtgatttctttgcaacagagccttatgcgtgtgaaccatcaagtctgccccaatacccaccaagtaaagagatggatgctaaacgaagagacgaagaagctagacgcttaagggctgctggtggtagaggtaacggagatggaacaaggnagacaaggacacgggatcggcctagggctgtttccagcgccnagagnnaacgcnccnacttgcagcnaaccttgataaa

SEQ ID NO: 5628 - DNA, 264 bp, Zea mays
  misc_feature: Incyte ID No: 700457367H1
gggccctttgccggtgcaggcggcgcagacccaccgcaccaggctataaatggcaggaaggcaccgggcaccccgacaataccatgatgaacctcgaggataccgtgatggtccaccacctccacttccacgaccaagacctctctacaccgcgtcgcatggcagaggaactgtctaggcgccgtgctgagatccgtagaatccatgaggacaatcagcgtctggcggatgaattgttagtctcaagcaaaccatgccgcgttt

SEQ ID NO: 5629 - DNA, 264 bp, Zea mays
  misc_feature: Incyte ID No: 700457371H1
  unsure 68, 217, 246: a, t, c, g, or other
cttctttactgcccgagagttctgactagccacatccagtacaagcagtaaaggcgcaccatggaggnggcggcggagaataaggaggccgagcaggaggagcagcagctaccgcacgcgcagaaggataacgcgcccgccgccgccgaggaagacgaagcggattcggaggagaccgagcgccgcaaccgcgactacaagtccggctttcaccccntaggcacaaatacgtgctctggtcacatncgccggacgcctggtagc

SEQ ID NO: 5630 - DNA, 258 bp, Zea mays
  misc_feature: Incyte ID No: 700457373H1
  unsure 4, 42, 179: a, t, c, g, or other
ctcntggtcacagcagctcctcgacgccggcgtccgaatcanccaaggggacataagaaagaaggatgatgtgcggaaggctttccgtggagtggactgtgttttccaccttgcttcttatggcatgtcagggaaggagatggtgcagactgggagatctgatgaggttaatataaagncggacctgcaatgtactggacgcttgccatgagcaagatgtcagaaggctgtgtatgtaagcacatacaatgtggtatc

SEQ ID NO: 5631 - DNA, 253 bp, Zea mays
  misc_feature: Incyte ID No: 700457374H1
  unsure 29, 33, 39, 43, 47, 60, 163, 197, 208: a, t, c, g, or other
tctctctcggcgacgactgggcgaccgancaancgtcgntgcnctangccaggtgccaangtctcttcgggtccttcgccggcgaccagcagcaccaggcatagacttgtgtaagaaatggatgcaatgccggttaattgcgacacgcatttatatggacatngatattggggcctcgtgtaagggcggaagtgttncctaccgcgtncaataaggggagtctgctggttctaccaggaagatccattccaca

SEQ ID NO: 5632 - DNA, 253 bp, Zea mays
  misc_feature: Incyte ID No: 700457375H1
  unsure 181, 214, 216: a, t, c, g, or other
gttctggaggtccttgggaaaaaactgtcgtttgagattgctgttggactcaatggtcgagtctgggtgaatgctcctgcagcaagtactgtcattcttgtatcaaatgcaataatgcggtcagaatcttgagcggcataaaacaaagagctatggtagaaaatctattggagagattgtncatgatgataagtcagcaagcatagtctaaagnanaatggaggagtttccatgtgtcagttcaaagtaaaag

SEQ ID NO: 5633 - DNA, 248 bp, Zea mays
  misc_feature: Incyte ID No: 700457376H1
  unsure 4, 16, 48, 82, 93, 125, 137, 160, 179, 192, 216-217, 224, 231: a, t, c, g, or other
ctgngcaccacctgtngccagcgccttgagaaggtccttggcaccgancactgccatatccttcgcgtgccttcagaacagnaaaggaatcgntcgcaagtggatctcgcgatttgaagtctggncgtactggagantacactgatgacgtggcgcatgngattgctggagagcttcangccaatctgaccngatcatcggaaactacatgacggnnaccttgntgcgtgnttgttcgcccacaagat

SEQ ID NO: 5634 - DNA, 261 bp, Zea mays
  misc_feature: Incyte ID No: 700457378H1
  unsure 47, 114, 120, 133: a, t, c, g, or other
ctcgcctgcgctccctacgccgccccagttccccaccccctgctcanccacccgtccccctcctgctgcgcccatggctcccatcgctgtcggcgacgcccttccccgatcggncagctncgggtggttcgangagaacgaccagctgcagcaggtctccgtccacgcgctcgccgccggcaagaaggtcatcctcttcggcgtccccggcgccttcaccccgacctgcagcaaccagcatgtgccaggcttcatcacaca

SEQ ID NO: 5635 - DNA, 254 bp, Zea mays
  misc_feature: Incyte ID No: 700457379H1
  unsure 21, 25, 35, 37, 45, 48-49, 53, 58, 64, 79, 101, 234: a, t, c, g, or other
tgaatcagcacctgctaatgntgancacgtgcaanantccgtgangcnnagtntcagnacagcnaacaaagatggtttnagctgcgagattgacgcattangcgtcccaggagactgcaattattgatcttgggggagcaagaggaacagttgacctgaatgacataagaacacaggttcctgcattacctggaagggatgtgctagatgtggaggcacatattttggagcaanagaaaacatcttcaccaggt

SEQ ID NO: 5636 - DNA, 254 bp, Zea mays
  misc_feature: Incyte ID No: 700457380H1
  unsure 17, 33-34, 36-37, 60, 144, 156, 160: a, t, c, g, or other
aacgccatcctccagancatcgccgaggggaannanngcgactgctgatcttggtggaanggcatcgacatcagagtttacaaacgcagtctgtgatcacatctgagaaacggatgtgattcttccttctgattgttttgtcancctaatattttnttgncacatatgagaggagctttagctttaagaggttaactggcagcacctcgaacttctttggggtgtttaacacggtttgagaccgtcaaataatt

SEQ ID NO: 5637 - DNA, 89 bp, Zea mays
  misc_feature: Incyte ID No: 700457381H1
  unsure 23, 29, 31, 55: a, t, c, g, or other
ccgccgcctccgaacatcgtctncttcgntnccatgagcaaccgataatccgccngcgctgagatgttggtttatccaagacctcctat

SEQ ID NO: 5638 - DNA, 261 bp, Zea mays
  misc_feature: Incyte ID No: 700457382H1
  unsure 43, 46-48: a, t, c, g, or other
gcccggtggatggacgtatctactgaatgcgacgactgagganggnnncacccttcgccgttgagcgcgtgcaggatctccgcacagggcctggtgtggacagattgaagaaactcgtcacgggcttgctcacacaagaaggctttgctcacaagcactgcctgtgagactgcaccccagtaagatgattctggctgggggcggtagattacacggtcaaatcttgagggcatgaagccattttctgggaatatgcctact

SEQ ID NO: 5639 - DNA, 262 bp, Zea mays
  misc_feature: Incyte ID No: 700457383H1
cctatctggtataggacggagctgagcttctagcaacgtacagtgtatccgccatgagtcctttcggggcggtgatcacgccagaaaccctcaagtacatgtccaagtaccagggacgtgagatcacgcaggtggactgcgcacgggaggcgatgaggctgatccacgcggaagacaagaacctcaaggccgaggactcagcgtgggagctgaagaagaagttcggcaacggcgtgagcaccatggtcctcgtctacaacgc

SEQ ID NO: 5640 - DNA, 251 bp, Zea mays
  misc_feature: Incyte ID No: 700457388H1
  unsure 5, 7, 40-42, 46, 58, 216: a, t, c, g, or other
cgtanancagtccattattgccgtctcccttttgcgtgannnaganagagagcgagangcagtcgccatgtctggcatcatccacaagatcgaggagaagctccacatggggggcgaccacaagaataaggaggaggagcaccacaagaaggccgaggagcaccacaagaaggaggagggggagcaccacaagaaggacggcggggagcacaaggnaggcatcgtggagaagatcaaggacaagatcaccg

SEQ ID NO: 5641 - DNA, 242 bp, Zea mays
  misc_feature: Incyte ID No: 700457391H1
  unsure 45, 137, 140: a, t, c, g, or other
gaattgtgttcagaccagcactcaatctcaagggaggagcaggantcgtatgctatcctcagcaatgaacgtggcatagcagctcgggatagcggtgcattttcttgggagattgttcctgttgaaatttcttctgntgnagggaaaccaccagttgttgttgacaaggatgagagtcttgcaaagtttgatccagtaaagctgaagaaattgggccaacttttaagacgaatggttctgta

SEQ ID NO: 5642 - DNA, 254 bp, Zea mays
  misc_feature: Incyte ID No: 700457392H1
  unsure 2: a, t, c, g, or other
gnccacagccagtcagccacatcactagctatctgtgcagagggcaatggcgtccaaggttgagctggtggtggaggtcaagtccccggctgacaagctgtgggcggcgctgcgtgactcgacggagctgttccccaagatcttccccgagcagtacaagagcatcgagaccgtcgagggcgacggcaagtcggccggcaccgtccgcctccttcaagtaacaccgaggcggtgccgatgctgacgttcgccaa

SEQ ID NO: 5643 - DNA, 251 bp, Zea mays
  misc_feature: Incyte ID No: 700457394H1
aaccgacgacgacccccgggcagaggcgaggcgtatgcatgtagcccaaggaagcagtggggctagatttccccgcgcctcgttttctcggcacttgcgtcggcaagcatctccttcttctcagacagacacacggtgttggaccgacgatgatgacggtcggtttctgatccgtttctctcagctccaacgcagagaaggagagagaggaagacagccagacagaaatacaccggaagcacgcgaggaca

SEQ ID NO: 5644 - DNA, 258 bp, Zea mays
  misc_feature: Incyte ID No: 700457396H1
  unsure 42, 79, 84, 87, 98, 118: a, t, c, g, or other
aacaagtttcatcatcaacagaagggccttttgtcgcctgtncataccaaacaggatgtacttcacccagggggccttnatccnatnaataatccatnctccatttggtggcatgtancctcggtcccctcggactatggagttaacatctccccctaagtgtccgtgttggtgttggagctgctgttactccgcgtgatatgttggatcagttttcttcctgaacaagcaccaggtgccatctgtgggatcgccacg

SEQ ID NO: 5645 - DNA, 268 bp, Zea mays
  misc_feature: Incyte ID No: 700457401H1
  unsure 136: a, t, c, g, or other
gcttcgttgagtcctgacagaaaggtggttgttattgtgggtgatgatcctgatggtctacttattgatgcaaactctggaaagacagttcattccataaaaggacatcgggactactcatttgcatcggcttggngccctgatgggcgaacatttgctaccggcaaccaagacaagacatgccgaatctgggacgtgaggaacctttcaaaatccgtccatgtgttgaggggtaaccttggagccatccggtccatccgcttcacct

SEQ ID NO: 5646 - DNA, 267 bp, Zea mays
  misc_feature: Incyte ID No: 700457402H1
  unsure 3, 9, 11, 24, 38, 105: a, t, c, g, or other
cgnacggcnanggcaacgactggngcgacagtcgctanccgccctacttgccggttgctcggatcttcttcggcccgttagccgtcgacgagcaccaccaggganaccagatacttcagtggcttcgcaaggatgtcctggtgcactattgagtctgatcctggtgtgttcactgagctgattcagcaaatgcaagtgaaaggtgtacaggtggaagagctttactctctcgatgtgggctctcttagtcaactgcggccagtatat

SEQ ID NO: 5647 - DNA, 266 bp, Zea mays
  misc_feature: Incyte ID No: 700457403H1
  unsure 42, 62-63, 82, 237: a, t, c, g, or other
gccgctgcgagaatggcgctcgtctcttgcgcccgccgcctnccgtccttaccctctccgcnnaccctctcgaggccccgcnccggcgccgtctcatttctggctgcccaaccgtcgccggcgacggcaccgagatccggcaggaatcttgctctcttctgttctttatcaccgacgtcgccatcgctaactgaggccgccgtagcactgccgccaccgaaggctgcggtggaaganacgaagccccctgtgccgagcggggacga

SEQ ID NO: 5648 - DNA, 261 bp, Zea mays
  misc_feature: Incyte ID No: 700457404H1
  unsure 42, 195: a, t, c, g, or other
gcaaaatctatccaaatgttcatgttgttcaatcaacttttnagatccgaggaatgcatactcttatccgtgatagggacatcaccacacctgactttgtattttattcagatcgattgatccgtttggtagtggagcatggtcttggacatttgccatttacagaaaagcaggttattaccccaacaggatctntttatatgggagttgacttttgtaagaagctctgtggagtctctattgtgcgaagtggtgagagta

SEQ ID NO: 5649 - DNA, 260 bp, Zea mays
  misc_feature: Incyte ID No: 700457407H1
gcaagaactagtgttgccagtaccacagtgctgtcttcaacttcaggactcttcactcttttcattggtgttttacttggccaagactccataaatgctgcgaaaattattgctgttttcattagcatggctggcgttgtaatgacaactgtgggccagacttgggcatctgatgaatcagaagcaggcaaatctggttttacacagaggactcttctaggtgatatgtttggtcttatgtcagcaatcgcctatggtct

SEQ ID NO: 5650 - DNA, 261 bp, Zea mays
  misc_feature: Incyte ID No: 700457409H1
  unsure 180: a, t, c, g, or other
cggcgcacctggttggcagcttgggtggacatgggcaaagaaggaggttatatggtcaatggttggggctcagaccactgaacagggcgactgctcaaagttcaagagcagcccaccccattgctgcaagaaagatccaacaattgtcgatttacttccaggcactccatacaacatgcnaatgcgccaattgctgcaaggcaggagttgtaaatacctttaaccaggacccagcaaatgctgcttcctccttccagatca

SEQ ID NO: 5651 - DNA, 258 bp, Zea mays
  misc_feature: Incyte ID No: 700457411H1
  unsure 6, 11, 24, 30, 37, 42, 66, 82, 119, 170, 176: a, t, c, g, or other
gccgcngcganaatggcgctcgtntcttgngcgcgcngcctncactccttaccctctccgctcacnctctcgaggccccgcnccggcgccgtctcatttctggctgcccaaccgtcgcnggcgacggcaccgagatccggcaggaatcttgctctcttctgttctttatnaccgangtcgccatcgctaactgaggccgccgtagcactgccgccaccgaagctgcggtggaagagacgaagccccctgtgccgagcg

SEQ ID NO: 5652 - DNA, 259 bp, Zea mays
  misc_feature: Incyte ID No: 700457414H1
  unsure 39, 89, 91, 93, 96, 109, 132, 137, 139, 159, 161-163, 204: a, t, c, g, or other
agcaccttcatgcccaataatagctgacctggttactgnacgcaatctgtttgacgcacttacaagttcatctggaggccgattgcatntncntgnatatgacaagtanctcaagagtgtagacagggaatngaggncngtgaaaggtatcatgcaacnannncttgcctcaagttttcatcttgatgctggagaatgcatatnagctattgatggagacaagcccattcaaccggtactgcaacatattggaatatca

SEQ ID NO: 5653 - DNA, 262 bp, Zea mays
  misc_feature: Incyte ID No: 700457416H1
atttctcatttcttgagatgaatccgttcaccatggtcaatggggagccatatcctctggacatgagaggagaactagatgacacagcagctttcaagaacttcaagaagtggggaggtatagaatttcctctaccttttggaagagtactcagccctacagaaagtttcatccatgaactagatgagaagacaagtgcctctctgaagttcacggttttgaacccgaaaggtcgcatctggaccatggtcgctggtggtgg

SEQ ID NO: 5654 - DNA, 264 bp, Zea mays
  misc_feature: Incyte ID No: 700457417H1
gtcaacgtgacaaaagttgaaagtagagtgcggattctggcagatatgagagatctagcttcagctgggagtttggatagctttactctcattttcacaaatatactggaacatcaacctgattgcccgcctgaggttgttgagaagcttgtggcaatgcgggaagacattccaagaaaggaagccaaggagattgtacaagaatgcaaagagatatacgagaactcgctcgtggatggcaaccctcgcaagtcaggttttgtg

SEQ ID NO: 5655 - DNA, 264 bp, Zea mays
  misc_feature: Incyte ID No: 700457418H1
  unsure 60: a, t, c, g, or other
ccaaggagaagaataggaagttcactgagactgtggaacttcagattggtctgaagaatnatgatccacagaaggacaagcgtttcagtggctctgttaagttgccccatatccctcgtcccaagatgaaggtgtgcatgcttggtgatgcccagcatgttgaggaggccgagaagatgggacttgactacatggatgttgaggctctcaagaaaatgaacaagaacaagaagcttgttaagaggcttgccaagaagtaccatg

SEQ ID NO: 5656 - DNA, 263 bp, Zea mays
  misc_feature: Incyte ID No: 700457419H1
  unsure 36, 49, 66-67, 77, 87, 92, 107, 111, 133, 139-140, 145, 157, 166, 171,173, 180, 202, 225-226, 231, 244, 246: a, t, c, g, or other
caacccttcgtactcagtttccatcattggcatggngtccgataccganggcatcgccgccctctnntcgatgtacnacgacgacgnggaanatgaggatgccgacnagcncagccctcctttcccagcgctncccgcnnccgtnatctcctcctcnccgttgtcncctcnanccggggncgaggaccccaacccttctgtngcgcctccgtcaccttcccgtcnngaggnattggccagtctnanaaccctagcgagtcccc

SEQ ID NO: 5657 - DNA, 261 bp, Zea mays
  misc_feature: Incyte ID No: 700457420H1
  unsure 44, 62, 110, 199-200: a, t, c, g, or other
ctctgctgaagaccacatgctgctacagagagctgccatagcantttctccacagatgcaancccaaccattctgttcttccaataaaatactggtatggtgagagtganggttatccttctcagaaagggagagatcaagaaagatgagatataaattcatatgctaccagaacaagaaagatgagagcggttggtgnncgagactcctaaaaaaggacctgtgttcttgaaggttgactggacaaatggtatgacgagg

SEQ ID NO: 5658 - DNA, 259 bp, Zea mays
  misc_feature: Incyte ID No: 700457421H1
  unsure 136, 238: a, t, c, g, or other
ccggcaggcaccttcgactcgagcggagcaggcgaggcagagatggcgctgcgacgggcgctcctcagatcggtcgacttctcccccgacagcaaggctgcaattgagtacttttattctttctcaagggcacagnctgcttgttctctcaatggtgctggtctttgtcctgctagtagatcatttagcacccaggctgccactacgtcaagcacaccacagcctccacctccaccancccctccagagaagactcact

SEQ ID NO: 5659 - DNA, 259 bp, Zea mays
  misc_feature: Incyte ID No: 700457422H1
  unsure 25: a, t, c, g, or other
acattttggatcaagcccttttgangcctggccgcatagacaggaagattgagtttccaaatcctaacgaggactcacgtttcgatattctgaagatccattcaaggaaaatgaacttgatgcgtggtatcgatctgaaaaagatcgcagaaaagatgaatggggcctcaggagctgagctcaaggccgtctgtacagaggctggaatgtttgctctccgtgagagaagggtgcacgttacacaggaggacttcgagat

SEQ ID NO: 5660 - DNA, 257 bp, Zea mays
  misc_feature: Incyte ID No: 700457429H1
  unsure 14, 43, 72, 90, 251: a, t, c, g, or other
cgtaaccgtacgcnctcgttcccctcgtcgctctcccaagtcncaaccccggttcctttggtctgcgcgagncagcatggcgtcgccgtngcccgccgtctcgtctctggagacggaggcgccccaggctaccgtcacgagggagcgcaggctcaacccgggacctgcaggagcaccttccaaagccatatctcgcgagggctatggtggcggtggacccggaccatccgaccggaaccgaggggcgcgancccgcg

SEQ ID NO: 5661 - DNA, 255 bp, Zea mays
  misc_feature: Incyte ID No: 700457430H1
gaaacatctgatctgaagattgtggccgaaaattttgaacaaaacctagagattacaggcacatccttggaggctcgtaagctggtcgttgaaatctgtgacattgtggcgacaagagcagcccggctggctgctgcggggcttgcagggatcctcatgaagatcgggagagatcacagcgtcgaggaccaacggtcagtcatcgccatcgacggaggactgttcgagcactacaccaaattccgccggtgcttg

SEQ ID NO: 5662 - DNA, 259 bp, Zea mays
  misc_feature: Incyte ID No: 700457432H1
  unsure 18, 79, 164, 222: a, t, c, g, or other
gaactttgtatgctaggnttgtgaagaatgtattggcgaaagggagagctgtgcattggtggaaaaactcaactatcanaatgaagatatccacgtttactttgtccatggaaaagaagcaccaaagtctattaaagaagcatctaaagctgttactgtaccanatcgtcggacatcgaagcgttcccggagaacaagctctggaaactcaatcagtttganagtctctggctctacatctgtctatcagttgaaactg

SEQ ID NO: 5663 - DNA, 261 bp, Zea mays
  misc_feature: Incyte ID No: 700457434H1
  unsure 43: a, t, c, g, or other
ctagattggtatcgaatacaattcttccaagagatatacgtgnactgggttggtgtcatgttccagcatattttaatgcaagatgcggtcgctggcgctcatgctgacgtggtccgtcgccaccgtgctcactctcctcgccgtgggctcgccccatccaccacctcagcaatgctagaacggaaaaccaggttgtgcaaaagagtacttgcgactttgaaggtcttatggtcagtaatagaggatatgacgaagtacata

SEQ ID NO: 5664 - DNA, 258 bp, Zea mays
  misc_feature: Incyte ID No: 700457436H1
  unsure 46, 69, 80, 128, 155-156, 204: a, t, c, g, or other
tggcagagcaggcggacggttacgaggagatggtcgagttcatggngcgcgtcgcgtgctccgccggcngcgccgggtangggaggagctatccgtggaggagcgcaacctgctgtccgtcgcctacnagaacgtcatcggcgcccgcaggcctnnttggcggatcatctcctccatcgagcagaaggaggagggccgcgggancgaggcgcacgccgcctccatccgcgcctaccgctccaagatcgagaccgagct

SEQ ID NO: 5665 - DNA, 257 bp, Zea mays
  misc_feature: Incyte ID No: 700457437H1
  unsure 59, 114: a, t, c, g, or other
gcgagccaagaaggtgttgtcagtagcagtttataatcactataaaaggatctattgtnaatcactcatcaacaggtctgctgcggattgcagtcagagtgattcttgcacgantgacaccgacatggtagagcttgagaaaagcaatattcttgtcatgggaccaacgggctcggggaaaacattgctggcaaaaacactggcaagatttgtgaacgtgcccttcgttatagctgatgcgacaagcctcactcagg

SEQ ID NO: 5666 - DNA, 257 bp, Zea mays
  misc_feature: Incyte ID No: 700457439H1
  unsure 186: a, t, c, g, or other
cccaatccaaaccagacaagcaaggaatcccccgatggctcatcgcgttctcctcctcctctctctcgcgtcggccgccgcggttgccgccgccgtcgacgcggaggacccgctgatccggcaggtggttcccggtggagatgacaacgatctggagctgaacgcggagtcccacttcctgagctncgtgcagcggttcggcaagtcctacaaggacgccgacgagcacgcgtaccggctgtccgttttcaaggcca

SEQ ID NO: 5667 - DNA, 255 bp, Zea mays
  misc_feature: Incyte ID No: 700457441H1
  unsure 78-79: a, t, c, g, or other
catggatgaaggaggccaatccaaaggctttggttttgttcagtatgaaaaagaagaagcagcacagaacgctataannagtcttaacggaatgcttataaatgataaacctgtttttgttggaccttttcttcgcaagcaagaaagggatcactcttttgacaagacaaaatttaacaatgtcttcgtgaaaaacttgtctgagtctaccacaaaagaagatttactcaaaatctttggtgaatatgggaatat

SEQ ID NO: 5668 - DNA, 253 bp, Zea mays
  misc_feature: Incyte ID No: 700457444H1
  unsure 20, 27-28, 45, 140, 176: a, t, c, g, or other
ggattgtactgtaagacgtnggagaannggcaatgctatagaggnttgggaagcgcacaaggttgcagtgcaaactgttctaaagctgcccacaggggaactcttcactggttcaagtgattccactattaagctatggnaaggaaggacttgcctacagactttctcaggacatnccagacactgttagatttttagcctcaatgccaggtctaggaattctttccgcctcacacgacagcactgtcaagtt

SEQ ID NO: 5669 - DNA, 254 bp, Zea mays
  misc_feature: Incyte ID No: 700457445H1
  unsure 190: a, t, c, g, or other
aggttgtttggctggatcgaaagcagaaaatcttctggagcagggagatatgattcttgctatcaacaaggagccaattacatgcttccttgacattgagaagacttgccaagagttggaccaatccattgggtcagatggagtgcttaacatgacaatattccgtcagggaaaagaaattgaccttgtngtcggaactgatgtaagagatggcaatggtacaacccgtatggttaattggtgtggttgcatta

SEQ ID NO: 5670 - DNA, 253 bp, Zea mays
  misc_feature: Incyte ID No: 700457446H1
  unsure 102: a, t, c, g, or other
ggctttgcgcatgcatcctgttgttaggggttcggtgacaatgctgtctgcttatggagatttcaatgctttcccaaggagactccgggagggatgccaganaactggagtcaaacttgttgatgttcctaatggacggaaagatgctgctgataaggctatactggttgatatgttcctttttgcacttgacaatcacccaccatcatccattatgctcatatctggtgatgtggacttcgctccggcattg

SEQ ID NO: 5671 - DNA, 257 bp, Zea mays
  misc_feature: Incyte ID No: 700457447H1
  unsure 3, 193: a, t, c, g, or other
ggnacccccgagtttcaggagagatatgcggagactgtaatatacagaatcttttactccataaatagatctgggaatggccatctgactctcagagagctcaaacgtggaaatttaattgctgcacttcagcagttagatgaggaagaagatatcaacaaagtgttgagatacttctcatatgagacacttntatgtgatctattgcaaattctggggagctggatgcagaccacgatttttgattgataaggagg

SEQ ID NO: 5672 - DNA, 257 bp, Zea mays
  misc_feature: Incyte ID No: 700457449H1
  unsure 183: a, t, c, g, or other
agcgtggggatggccatcctcccgtgtttagcaactccagtccctctctcttcggctatgatctaacaagctctggagcccagcaaaccccggcgagcaagctaaagacggagctttgagcgacgatggatggtagacagcattgtcaggagagcaggctgaacatatgcggtgggggcgcanagcgacatgattccagcaagttgatcaggtcaggctacaaacgggctgggaatgttgatgtggagcgcaggaga

SEQ ID NO: 5673 - DNA, 256 bp, Zea mays
  misc_feature: Incyte ID No: 700457451H1
aaagagcttacctctgaagatgaagtggctcgtttactgaactgcactgaccactattcagcattaggtttccgtcgatatgagaacatagatgtatcatctcttaagagagaatacaagaaaaaggctatgttagtccatcctgataagaatatgggcaatgataaagctgctgatgcatttaaaaagcttcaaaatgcatatgagattcttcttgattcactgaaacgcaagacatatgatgatgagttgagga

SEQ ID NO: 5674 - DNA, 252 bp, Zea mays
  misc_feature: Incyte ID No: 700457453H1
agatatgcgtcatgctttgtgctgaccatggtccctgtgtatctggtgctcataactctatagttactgctagggccggaaaggaccttgtttccagcttggtgtctggattattgacgattggtccccgtttcggtggagcaattgatgatgcagcccgatacttcaaagatgcatgtgataggagcctcacgccatacgagtttgttgaaggcatgaaaaagaagggaatccgtgtgcctgggattggtc

SEQ ID NO: 5675 - DNA, 245 bp, Zea mays
  misc_feature: Incyte ID No: 700457455H1
  unsure 175-176: a, t, c, g, or other
gttaaatcagtatttctccgggttggaatgcttgatcctttagtggcttactactagaacttgtagtcaataagtagctataatgtggagtagcagtatcttgcagaatgcttttattaatttctacatttagctttatctatctgtgtgctttgccatgagtggagtttcaggnnccttcatctctagttataagctagagtagcttgactgcttatggacaaaattatctagttgtacctctg

SEQ ID NO: 5676 - DNA, 252 bp, Zea mays
  misc_feature: Incyte ID No: 700457457H1
gaaagagcttacctctgaagatgaagtggctcgtttactgaactgcactgaccactattcagcattaggtttccgtcgatatgagaacatagatgtatcatctcttaagagagaatacaagaaaaaggctatgttagtccatcctgataagaatatgggcaatgataaagctgctgatgcatttaaaaagcttcaaaatgcatatgagattcttcttgattcactgaaacgcaagacatatgatgatgagtt

SEQ ID NO: 5677 - DNA, 254 bp, Zea mays
  misc_feature: Incyte ID No: 700457464H1
  unsure 60, 65, 130, 135, 143, 148, 164, 214, 245: a, t, c, g, or other
ctcgatcccagcatccgagagagctccacaggccaggtccccatcgccgcggcgcttgcnccacntctcccccgcccggtagtagcctcgccgccgttgccgagatggggttcgtgtccttcgtcggganggtgntcttcgtngccgntttcctcctctccgcntaccaggagtttaatgaattcggtgctgatggtggaccagcagctaaggnccttcggcccaaattcaacgtgtttgtcaanaatgtatct

SEQ ID NO: 5678 - DNA, 257 bp, Zea mays
  misc_feature: Incyte ID No: 700457466H1
  unsure 53: a, t, c, g, or other
gaaagcgtgttgctgtaaagtatttctcagatgattggccgactaatgcatcnaagttagcctacgaaaagtctgtttttactaaaactctaaagacaaatgcacggacagaagctgagataacattgtttgatggttatattgtcgtttacaagtttgtacatgaccttcacttttttgtcaccgctggagatgatgagaatgagctcatcttagcaagtgtactacatggtttttctgattctgttggtcttcta

SEQ ID NO: 5679 - DNA, 253 bp, Zea mays
  misc_feature: Incyte ID No: 700457469H1
  unsure 92, 129: a, t, c, g, or other
tggagttgatggtcactgggcaagagactgtcaggctggtgactggaagaacaaatgctaccgttgtggcgaaaggggccatatagaaaganattgccagaacagtccaaggaacctcaggcgtgaganaagctattcacggtctctatccccacgccgaggacggggccgcagccggagctacagcagaagccggagctatagccgatccagatccccgtctggatctcctaggggtggacgccgagaccgt

SEQ ID NO: 5680 - DNA, 253 bp, Zea mays
  misc_feature: Incyte ID No: 700457471H1
  unsure 83, 85, 178, 180, 188, 204, 243: a, t, c, g, or other
aaggaacacggccctaactaaaccctagctaagggaagggaaacaagaccatggatgcctccaagctccgcgagcttcgcgantncgtcgaggcgtgcaagaagaatccttcgctcctcgccgaccccaacctctccttcttccgggattacctccagagtttgggtgccaaaattcncnggaacgcnccctctttcgaaagtnccaagagatcttccatggacgacattgatgacgacggtnatgacgacga

SEQ ID NO: 5681 - DNA, 250 bp, Zea mays
  misc_feature: Incyte ID No: 700457473H1
cttggacacccacgccaagtttgggatatttccttcctggggtctttcacagaagctttctcgcatcattgggccgaatagagcaagggaagtgtcactaacttgcatgcctgttactgctgaaatggcagagaggtgggggcttgttaaccacgtcgtggatgataatgaggtgctgagtaaggcgatagaggttgctgaggctattgtgaggaacaaccgcaacttagttgtattgtacaaatcggtt

SEQ ID NO: 5682 - DNA, 248 bp, Zea mays
  misc_feature: Incyte ID No: 700457475H1
  unsure 33: a, t, c, g, or other
ttctggaggtccttgggaaaaaactgtcgtttncagattgctgttggactcaatggtcgagtctgggtgaatgctcctgcagcaagtactgtcattcttgtatcaaatgcaataatgaggtcagaatctttgagcggcataaaacaaagagctatggtagaaaatctattggagagattgtcatgatgataagtcagcaagcattagtctaaagtaaaatggaggagtttccattgtgtcagttcaaa

SEQ ID NO: 5683 - DNA, 250 bp, Zea mays
  misc_feature: Incyte ID No: 700457477H1
  unsure 77: a, t, c, g, or other
ggaaggcggacccggacctcgaggccggcgggtcctcgctgctgtacccggggatgacggagagtcccgaactgcgnacggcgttcgtccgcaagatctacgtcatcctcacggtccagctcgccatgacggcagccgtctcggccttcgtcgtcaaggtgcccgccgtctccaattttttcgtctcctccaacgccgggatcgcgctctacatcttcctcatcgtcctgcccttcatcgtgctgtgccc

SEQ ID NO: 5684 - DNA, 252 bp, Zea mays
  misc_feature: Incyte ID No: 700457478H1
ctcgcctgcgctccctcgccgccccagttccccaccccctgctaacccacccgtcccctcctgctcgcccatggctcccatcgctgtcggcgacgccctccccgacggccagctcgggtggttcgacgagaacgaccagctgcagcaggtctccgtccacgcgctcgccgccggcaagaaggtcatcctcttcggcgtccccggcgccttcacccccgacctgcagcaaccagcatgtgccaggcttcatca

SEQ ID NO: 5685 - DNA, 253 bp, Zea mays
  misc_feature: Incyte ID No: 700457479H1
  unsure 164, 182: a, t, c, g, or other
gggctcaaataaggttagaaggagtttacatatggccttttagacaacttcgcatggtagcaaacagtggtgcagatggtgaaccactccaggaagaggattatttcttgtcaaatccataccatttattgcggattttctcctctcaagtgtttcaagaatcntctgaagagaagaaccgnaggaagaattctctcacatatgacatggagaaacattgcaacacagaaatagctgctaaggtggttcgtgt

SEQ ID NO: 5686 - DNA, 254 bp, Zea mays
  misc_feature: Incyte ID No: 700457481H1
  unsure 94: a, t, c, g, or other
ccgccgcctccgacatcgtctcttcgtccccacgagcaaccgataatccgccggcgctgagatgttggtttatcaagacctcctatctggcgangagctcctgtcggattcattcacctacaaggagctcgagaacggcgtcctgtgggaggtcgagggaaagtgggtcacccaaggtcctgttgatgtagacattggtgccaatccatccgccgagggtggtgaggatgaaagcgttgatgacacagccgtga

SEQ ID NO: 5687 - DNA, 250 bp, Zea mays
  misc_feature: Incyte ID No: 700457486H1
ggatccgaaaggcttagttattctgaaattgcaacacaattaaacctgtcagatgatgatgtagtgcgtttgctccattcactttcttgtgcaaaatacaagatccttaacaaggaaccagcaaatagatccatctcgcccaatgatgtttttgagttcaattcaaaatttactgacagaatgagaagaattaagattccactgcctcccgttgatgagaagaaaaaggttgttgaagatgttgacaaag

SEQ ID NO: 5688 - DNA, 248 bp, Zea mays
  misc_feature: Incyte ID No: 700457491H1
aagcactacaccaaggactttggcatcgagtgccgcgtcggccgcttccacaacatctacggccctttcggaacatggaaaggtggccgcgagaaggcaccggctgccttctgcagaaaggctcagacatccacggagaggtttgagatgtggggcgatggtctccagaccaggtccttcaccttcatcgacgagtgcgtggagggtgttctgagattgaccaagtcagacttccgcgagccagtgaa

SEQ ID NO: 5689 - DNA, 111 bp, Zea mays
  misc_feature: Incyte ID No: 700457492H1
  unsure 2, 27, 31, 37, 50, 61, 82, 97: a, t, c, g, or other
anctaatccccttccctcccattgggnagcngtcgcnatgactgcgcgtncgaaattcggnttccttcccttctgcttcggnggccgcctcgcccgncttccgctcacccg

SEQ ID NO: 5690 - DNA, 252 bp, Zea mays
  misc_feature: Incyte ID No: 700457496H1
acaagtttcatcatcaacagaaggggccttttgtcgcctgtcaataccaacaggatgtactcaccaaggggccttgatccatcaattatccattctccatttggtggcatgtctcctcggtcccctcggactatggagctaacatctcccctaagtgtccgtgttggtgttggagctgctgttactccgcgtgatatgttggatcagttttcttccctgaacaagcaccaggtgccatctgtgggatcgcca

SEQ ID NO: 5691 - DNA, 278 bp, Zea mays
  misc_feature: Incyte ID No: 700457504H1
  unsure 7, 41-42, 50, 54, 72, 75, 124, 142: a, t, c, g, or other
ggcgcanaggaatctggtgtctcttgctccgaccccgttgnngactgatnacgngatccccttctcctgcantgncgtgcctccgtgcgctgcgatgcctcggtattactgtgactactgcganacctacctgacccatgantcgccatctgtccggaaacaacataatgctggatacaaacacaaggcgaatgttcgaacctactatcagcaatttgaggagcagcaaactcaaagtttaattgatcgaagaatcaaggagcatcttggacaagctg

SEQ ID NO: 5692 - DNA, 276 bp, Zea mays
  misc_feature: Incyte ID No: 700457507H1
  unsure 66, 119, 125, 268: a, t, c, g, or other
gcgcagtatcgtgattcagtcagggcagcattatactgaacttctatctggcgttagagaaggtcnaccaaccgatcttggcgcgacctctagcagttgggcagcgtgttatagcctgncatccnagaacaagggaacttcatgatgggaatgttcttactgtcgatcataatcagtgccgggttcagtttgatcgacctgaactgggtgttgagcttgtgaaggatatcgactgcatgcccctacatcctctggaaaattttcctgnatctctca

SEQ ID NO: 5693 - DNA, 273 bp, Zea mays
  misc_feature: Incyte ID No: 700457509H1
ctcccctgttcggttttaggagacctgcgccgcccctccggccacgcgagctcgccgaaatggtcgcccacaggttccatcagtaccaggtggtgggtcgcgcgctgccgaccccgaccgatgagcaccccaagatctaccgcatgaagctctgggccactaacgaggttcgcgccaagtcgaagttctggtacttcctgagaaagctgaagaaggtgaagaagagcaatggccagatgctcgccatcaacgagatcttcgagcgcaacccaa

SEQ ID NO: 5694 - DNA, 270 bp, Zea mays
  misc_feature: Incyte ID No: 700457510H1
gccacttgcaattcaacgacaaagcagaccggatccacaacgccatcctccagactattgctggggggaagtacaggactgctgatcttggtggaaaggcatcgacatccgagtttacaaatgcagtctgtgatcacatctgagaatcggatgtggttcttccttctgattgttctgtcttcctaatatctttttgtcgcatatggggaggagctttagctttaagaggttaactgggcagcacctcgaacttctttgggtggttaacac

SEQ ID NO: 5695 - DNA, 272 bp, Zea mays
  misc_feature: Incyte ID No: 700457513H1
  unsure 7, 21, 264: a, t, c, g, or other
cccagtngatcggcggcggcnatgtcgctgtcctcggtgaagatcggcgaggaggtttggctcacatgcctctcccacgccctcactaccgagaccgaggaggtcatgggcctcctcctcggcgacatcgagctttccagcaagggcgccaccgcccttagaatggggagcgtctccgcagatgaggtgcgagcggaagaaggaccgcgtcgaggtcaacccggagcttctcgccgccgcatccgcgcaagccgagaaaatgangcaccatt

SEQ ID NO: 5696 - DNA, 178 bp, Zea mays
  misc_feature: Incyte ID No: 700457514H1
  unsure 5, 33, 36, 52, 71, 103-104, 147, 156, 164-165, 168, 171, 176-177: a, t, c, g, or other
cgtantcgtagcgcacacaatgggcgtgcaganagncattggcgtgtccttngctccatgcactgcttgtnttgttgctgggcattgttcttctcgtcgtgcnnaggggcagaacccatctggccacctgagcgtggatgcctctcngcagaaagntaggaagnnccnggntaagnnt

SEQ ID NO: 5697 - DNA, 277 bp, Zea mays
  misc_feature: Incyte ID No: 700457517H1
  unsure 72-73, 118: a, t, c, g, or other
cgtaaccgtacgccctcgttcccctcgtcgctctcccaagtcccaaccccggttcctttggtctgcgcgagnnagcatggcgtcgccgtcgcccgccgtctcgtctctggagacggangcgccccaggctaccgtcacgagggagcgcaggctcaaccccgacctgcaggagcaccttccaaagccatatctcgcgagggctatggtggcggtggacccggaccatccgaccggaaccgaggggcgcgacccccgcggcatgagcgtgcttcagcag

SEQ ID NO: 5698 - DNA, 274 bp, Zea mays
  misc_feature: Incyte ID No: 700457518H1
  unsure 44, 51, 96-97, 103, 190: a, t, c, g, or other
gccgtgagacacaagaatagggtgagcaacatcgacgtggtgtncaaggangaggccctggacttcatcgagcgtgatcagacgtacaatgctagnntgaggntgctgctgctgtgtattgattgatctgcaggcagatgctaacgcagacaggatagttcttgttgtgttatggatattctggcctatngttgtagctgtgaatatgtgtgatgcagttaggtagctattggaccagcttgtttggcgcatcaacgttgtgaatgtagcagcc

SEQ ID NO: 5699 - DNA, 272 bp, Zea mays
  misc_feature: Incyte ID No: 700457519H1
  unsure 13, 24, 68, 72, 95-113, 147, 154: a, t, c, g, or other
gccgtgagacacnagaatagggtnagcaacatcgacgtggtgtccaaggaggaggccctggacttcancgancgtgatcagacgtacaatgctannnnnnnnnnnnnnnnnnntgtattgattgatctgcaggcagatgctaacgcngacaggntagttcttgttgtgttatggatattctggcctattgttgtagctgtgtatatgtgtgatgcagttaggtagctattggaccagcttgtttggcgcatcaacgttgtgaatgtagcagc

SEQ ID NO: 5700 - DNA, 272 bp, Zea mays
  misc_feature: Incyte ID No: 700457520H1
  unsure 7, 212, 267: a, t, c, g, or other
ctcgagnggtttatgtcgttacctctcatagcatgcttccttatagtttcgaagtgcaaggagatcccgttacttgtctgtatcataactcataaattgttcgaaactttgattgaggatgtggcgtgctctgctcctctaaacctggacgatgtggaatggtgggaaaaccccccctactattgtgttgtttgtgaatgtaccgttgtaancacaagtgaactgctgtctcggacaagaattattagctaaataaccatggtaaanaaaaa

SEQ ID NO: 5701 - DNA, 277 bp, Zea mays
  misc_feature: Incyte ID No: 700457521H1
  unsure 2, 53, 68, 114, 200, 270, 275: a, t, c, g, or other
gngtcgccgtcgccggtcacttaaggacgtgcggtctgactcggaggactcgngcaccagcaccagcngcgccagagtcgacaagagcagcgtcgtgcagagctcccctccgcngccgacctctggcagccaccgcccccccgggaacaagcgccggaagggcgtcccgcaccggtcgcccttgggcagcctcatcgttngagctctaggactcttcttcagcgccaaggcaaggcaaggcaaggcaacgcactctgtactgtacatganatagncc

SEQ ID NO: 5702 - DNA, 175 bp, Zea mays
  misc_feature: Incyte ID No: 700457525H1
gtccgctgagatggacagtagcagcctcaaatccgcgcactcctggagctgatgcgccagacctggccaccgatgccggcaaggaggtcaccaagaaggtcggcctcgtctaccagctcaacatcgcccccaagaagatcggcgttgatgaggagatcttcgtggtcgacctcaa

SEQ ID NO: 5703 - DNA, 270 bp, Zea mays
  misc_feature: Incyte ID No: 700457531H1
  unsure 6, 11-12, 16, 37, 40-41, 77, 94, 127, 147, 150, 174, 199, 218, 229,231-232, 234, 240, 245, 265: a, t, c, g, or other
gacgantcgannccgntgtgcggtggcgagcggtcgngcnntaacgtttcccttcagcttcgatcatgttggtggcngcgccgtgccacaaaangctcacccaccaaggatttgacggctgtcgagnccggggacgaggtggcgcantcngtgttctacgcagggggagctatnggttacggtctcggtttgtcaggcnttggcaagcaccagccgangccgccgcagnanntngcgganaacgncgtcgatcatggcgttgccntcaaa

SEQ ID NO: 5704 - DNA, 275 bp, Zea mays
  misc_feature: Incyte ID No: 700457533H1
  unsure 2, 21, 64, 141, 161, 176, 188, 246: a, t, c, g, or other
gnggaggcggcggcgcaagangaggaaggaaagggaggatgaggagagaaggcggaggaagaangagaatgagaggagaaagaggaaggagaaggagaaggagagggagaggaggaagaagaggaaggatgggaagaagantttggggaagaagggcgctntgaccaactcgtggnggaaatatggcntcatccgtgagctcgatatgtggagcaagcggccagagttcactgcatggctatcagnagtcaagcaggttaatttggaggcattgt

SEQ ID NO: 5705 - DNA, 277 bp, Zea mays
  misc_feature: Incyte ID No: 700457535H1
  unsure 17, 41, 68, 71-72, 86, 88, 92, 95, 128, 137, 163, 168, 190, 202, 215,222, 234-235, 242, 245, 250, 264, 267-268, 272, 274, 276: a, t, c, g, or other
cgcgcacgcttgccgantacaacatccagaaggagagcacnctccacttggtgctgcgcctcagaggnggnntgcagatcttcgtnangacnctnaccggcaagtactatcaccctcgaggtagattnttcagacancatcgacaacgtcaacagccaagatncaggncaaggagggcattcccccagancagcagcggctnatctttgctgggnagagctngtggtacgggcnnaacgttngcngattncaacattccagaanganngcancntnc

SEQ ID NO: 5706 - DNA, 274 bp, Zea mays
  misc_feature: Incyte ID No: 700457536H1
  unsure 19, 26, 58, 74, 147, 158, 259: a, t, c, g, or other
gcagcccagcacgtccctntctacgnctccacctccctcgattcgttccgagcccatncgcctccgccttcttncgttcaccgtcgaggtcgcaccacatggcggcgctcctagcccggcaggcagcgcaggcgctccgcgcgaganagtcggcgcantcgggccgacaacgtcgcgatgcaggggcacctccgtacctacatgaacgcggggattcccaagcggttcaaagaggaagaggagaaagaacagcttgcanaagatatcgcaaaag

SEQ ID NO: 5707 - DNA, 270 bp, Zea mays
  misc_feature: Incyte ID No: 700457537H1
gttgggtccttgactgggaagccatctgattcacgtctgataaatagttacaattgtgacttggaagacctcccaatgatgcttctgcagcaggtcgccagtcaagtaatccactggctccatgatgaagcgatgattcttgggatgaacgtgactagagattttctgtgcctgtactttgaccttggccaaggcgaaacacttggtctattggcacatgtcgacccggatgacacctatggctgcatctcatggtacctcactgttgat

SEQ ID NO: 5708 - DNA, 269 bp, Zea mays
  misc_feature: Incyte ID No: 700457538H1
  unsure 13, 24, 61, 245, 250, 265: a, t, c, g, or other
tccgttgctcgcntcgggtcaaancctaagcagggagttgatttatccgctgcagccatgngtaagttgcagtctgagtctgtcaaggatgccatctcccagattgttggggatgccaaggagaagaataggaagttcactgagactgtggaacttcagattggtctgaagaattatgatccacagaaggacaagcgtttcagtggcgtgttaagttgccccatatccctcgtcccaagatgaangtgtncatgcttcgtgatgnccag

SEQ ID NO: 5709 - DNA, 269 bp, Zea mays
  misc_feature: Incyte ID No: 700457540H1
  unsure 223, 227: a, t, c, g, or other
caggaggtgaggaggaacaggaaaggcgtgctgcaggtgcaggatcggctctgagatccgggctctcgtggagaacaaggcggagttcgctaggttcgtcgacgacaggttccggaagctcgacgccgatggcgacgggaggctgtcggtgaaagagctccagccggccgtcgctgacatcggtgccgccatcgggctgccggccagagggtcgtcgccgcangganccacatctacgcggaggtcctaaacgagttcactcgcgggaa

SEQ ID NO: 5710 - DNA, 264 bp, Zea mays
  misc_feature: Incyte ID No: 700457544H1
  unsure 51: a, t, c, g, or other
ctcgagcgctttctactcataaatcttgtggcaaaggcttctgatatggtncctggattaagctggctgaggctggatgagagtgttcgccagttcgcagtattcatgatgtctcaagttgatctttctagggaagctgctcatttgagtcgttttatctacaacttccgcagatggagacatgtgtctttccctaagcccttatatccatttgtgcatccatctgtcctagttgagactttgagaatggagaaagtgtttctc

SEQ ID NO: 5711 - DNA, 266 bp, Zea mays
  misc_feature: Incyte ID No: 700457545H1
  unsure 7, 60, 81, 256: a, t, c, g, or other
gtcgttnggacggtgctcggccctggttcccagcgtgcaaacgagtgcaggatggctgcnttgtttgctggcttccctganaccgtccctgttagaactgtcaaccgccagtgttcatctgggctacaggcagtagccgatgtcgcagctgctataaaggctggttactatgacatagggattggtgctggtttggaatccatgtccataaattccattgcttgggaaggacaagttaacccaataagcggcattnccgggaagcc

SEQ ID NO: 5712 - DNA, 265 bp, Zea mays
  misc_feature: Incyte ID No: 700457547H1
  unsure 39, 102, 104: a, t, c, g, or other
cgcactttttgggtccttgatactgttggcgatgaaggnctacgtgctgtggctgatgcatgctctgatctccgtgagctgagagtttttcctttggatgcntntgaggattctgagggttcggtctcagatgtcggtcttgaggcaatctcaaaaggctgccggaagctagaatcaatcctctacttttgccagcggatgacaaatgcagcagtaattgatatgtcgaagaactgtcccgagcttgtagtgttccgcctctgca

SEQ ID NO: 5713 - DNA, 272 bp, Zea mays
  misc_feature: Incyte ID No: 700457549H1
  unsure 145, 187, 191: a, t, c, g, or other
gaagatcatcaacctgagaaacgacgcgggccttacagctcttcacctggctgtggttggctgcgcacacccggatctcgtcgagctactgatggccaccccgtccatcgacctgaacgctgaagacgctaatggcatgaccgcnctggcgctgctgaagcagcagctgcgctcagcgacgtccgancggntcatcaagcagatcgtctctgccggaggggtcttgaactccagcatcctgagaacccggtcagccatcgcttctcagatca

SEQ ID NO: 5714 - DNA, 271 bp, Zea mays
  misc_feature: Incyte ID No: 700457550H1
  unsure 15, 36, 61-62, 75, 133, 135, 186: a, t, c, g, or other
gtcgttctggaagtntccacgctccgcgcctccgcnccctggtctgagtggtctccgctcnngtggcgccctcantcctcgccgccatgtccacctcgcccttcctagccagcagcggcagcagccgcaggcngnctaggcgctgcccacacccgacgggctggactgcgcgtggccgcgcttaantacgaccctgccaagtggcgccgcagaacgaccgggttctcgtccgtcttgagcagatcctgagaaatctgctggcggtgtgttg

SEQ ID NO: 5715 - DNA, 270 bp, Zea mays
  misc_feature: Incyte ID No: 700457551H1
  unsure 63, 81, 243: a, t, c, g, or other
aagtctcccgtcatcgtcttcgacgacgccgacctcgacatggccgttaacctcgtcaacttngccacctacaccaacaanggcgagatctgtgtggccggcacgcgcatctacgtgcaggaagggatctacgacgagttcgtgaagaaggccgccgagctcgccagcaagtccgtggtcggagacccgttcaacccgagtgtcagccaaggcccccaggttgacaaggaccagtacgagaangtcctcaggtacattgacatcgggaag

SEQ ID NO: 5716 - DNA, 272 bp, Zea mays
  misc_feature: Incyte ID No: 700457553H1
  unsure 39, 52, 115, 246: a, t, c, g, or other
ccagaacccagctcagacagacgccgccctccgctggcnctgctctgttccncttgcctccttgccccctgagcaggcgatttgtgcagcccggaaaccattcgaacacgccgancccgcccgcctccattgctcgcgtgcgtcagagaaggaaggaaaagaagaactaggagcagagttgaataggtcattatgcgccggtggctttgctgcagtcattttgacacgccgtatgtcgaaaacganaatggattatgagcagtcctgataga

SEQ ID NO: 5717 - DNA, 270 bp, Zea mays
  misc_feature: Incyte ID No: 700457555H1
  unsure 4, 13, 44, 64, 66, 108, 134, 179, 189-190, 197, 219, 250, 269: a, t, c, g, or other
agcnaatcaaggncgctctgcacgtactattcatcttccattgntgctttgctttgctttgctnancggcaaccatggccagcactcgtgcagcagcaactctccttntgctcctcgcgctcgccggcacctcntcggcgcagtgtcccacgggcttctactcctactcgtgccccggngtgtacggcnncgtcaantcggtgatgcagtccgccatcnccagggagaagcgcatgggggcctccatccnccgcctcttcttccacgant

SEQ ID NO: 5718 - DNA, 240 bp, Zea mays
  misc_feature: Incyte ID No: 700457560H1
  unsure 156-158, 209-210, 213-214, 217, 223-224, 228, 234-236: a, t, c, g, or other
gaacagtttggtccaacaacctgctagctccagcaatcacactgacgacataacttctccccctcctgcacaagcgagcaagcggacgcaacctcagaaagcaatgtccagccgggatcgtctcaaaatccagcgtgaatccctggctcataagcnnnacgccctcaagttgcggagagaaggaaagactgcagaagcatatgcagttnntcnntgnacgggnngttnggcaannngggg

SEQ ID NO: 5719 - DNA, 237 bp, Zea mays
  misc_feature: Incyte ID No: 700457561H1
  unsure 184, 186, 193, 213-214, 216-219, 230-231, 234: a, t, c, g, or other
cgatgacgttcctgagctcgtccctggagagacatttgaggaggctgcggaagagaaaaaggagtcatcatgattttgccacatgcccgcccttgtgaagggcttataagtaaagccttgcgtagaagggacctgttgagaactctgacctacattatttgtgcctgcgtacggttatgtcatnancgatttngtgtagccaaaaaaaaaaannannnncagtatggcgnnccngtc

SEQ ID NO: 5720 - DNA, 265 bp, Zea mays
  misc_feature: Incyte ID No: 700457562H1
  unsure 43, 82: a, t, c, g, or other
gaagaagaggggaagaaatattcttcccgtcgaaagacggagnagaggaaaagggacaagggcaaggcaagagagaggcgtngtcgtttgatctgctgccggagtgcgaagaggaagaggaagaggagcgccggagttgtaaagatgttcctggtggactggttctatggggtgctggcatcgcttgggctgtggcagaaggaggctaagatcctcttcctggcctcgacaacgccggcaagaccaccctcctccacatgctgaa

SEQ ID NO: 5721 - DNA, 268 bp, Zea mays
  misc_feature: Incyte ID No: 700457565H1
  unsure 24, 27, 37, 81, 84, 90, 96, 111, 128, 133, 184, 195, 206, 213, 223, 239,254, 256: a, t, c, g, or other
tccgatccgaccatggcggcagangcncttcggggcnttctccccggcgtttacgcatcgctgatggtaatcgccgtcacngcnccgccnccagcnatgcgtgactcggtngtcgtcggcctcgccanatgcnccgactgcaccaggaagaacttgaaggccgaggcggcattcaagggtcttnaggtggcgatnaagtgcaagancagcaanggcgagtacnagagcaacgccatggncaagcttgatggttngncgccttcagaat

SEQ ID NO: 5722 - DNA, 107 bp, Zea mays
  misc_feature: Incyte ID No: 700457568H1
  unsure 59: a, t, c, g, or other
gcctgctgcatttgtaatatattcgaaatccgtattttttttcttcacaagcactactnctatatacgatgaataaaagggcgacaatacagtgtcatcttgtggcc

SEQ ID NO: 5723 - DNA, 267 bp, Zea mays
  misc_feature: Incyte ID No: 700457570H1
gcgggcggcggcttgcactccatcccatcgcttgggtgcgtcgccccgaatccaatcgcctggtcaagtctgttgctgccggaggtagacggacgccttatcgtgctcgtggccgcagctagcgcgccggagccacagctggagcgctcgccggcgacgagtcgccgccccgcaaggagcctacgcaggcacgcaccgccacgtctaggcgccaggcggagacgttattaccacaacattaaaggagatgccttcactccagaaagc

SEQ ID NO: 5724 - DNA, 265 bp, Zea mays
  misc_feature: Incyte ID No: 700457575H1
  unsure 76, 193, 238: a, t, c, g, or other
tgaaaacaacatcatggacattgctggtatcctgatcagtcatgttccaaagttcagacccagagttgcgcaagtncacattcttggggctgttctagcagcatgtgggcataatgtgtatgagatggtggtggattttgattggtatgtttcactccttgtggatatggcaagaactctgcattgtgcccanggggatgagattggtcggcagtttgttgatttaggactgagagtncaggatgcgcggccagagcttgtccgt

SEQ ID NO: 5725 - DNA, 263 bp, Zea mays
  misc_feature: Incyte ID No: 700457576H1
  unsure 19, 74, 151, 205, 208: a, t, c, g, or other
gcagctcagcatacccgcntcggtcttctccgctgggacggtcatggactcgggcacggtgcatcacgcggctnccgccgaccgcctactcggcgctgtcgtcggcgttcaaggccgggatgaagcagtacccgccggcgcaggaggcgcnatccttcgacacctgctttgacttcagcggccagtccagcgtcagataccgtcngtngcgctagtcttctccgggggcgccgttgtcagcctcgacgccagcggatcatctt

SEQ ID NO: 5726 - DNA, 260 bp, Zea mays
  misc_feature: Incyte ID No: 700457577H1
  unsure 222, 225, 229, 251, 253, 257: a, t, c, g, or other
atttcagtgctgcttaaaaaattttgtggagaggaaggagaaaaggttgatgtccaaaaactgtttggttatcttgggctttttacccttgttgctctatggtggattgtctggccattaaccgcactaggcgttgagccaaagttttcaatgccccactcagctaaagtggatgaagtggtggtggcaaatagcctaatcggaagtgtattatcagactanctnggcnctttccggtgtttggactactncnttgnggc

SEQ ID NO: 5727 - DNA, 265 bp, Zea mays
  misc_feature: Incyte ID No: 700457580H1
  unsure 233: a, t, c, g, or other
atttcagtgctgcttaaaaaattttgtggagaggaaggagaaaaggttgatgtccaaaaactgtttggttatcttgggctttttacccttgttgctctatggtggattgtctggccattaaccgcactaggcgttgagccaaagttttcaatgccccactcagctaaagtggatgaagtggtggtggcaaatagcctaatcggaagtgtattatcagactacttctgggctcnttctgttgtttggactactcccttggtggcca

SEQ ID NO: 5728 - DNA, 267 bp, Zea mays
  misc_feature: Incyte ID No: 700457581H1
  unsure 41, 229, 266: a, t, c, g, or other
agaacctcaaacttttggaagtgatgaagcacaaaatccangtgctgaacaggaagctttcctctgggaactttttgggtcattaagatacttcaccctaccaatttggatggtcttaattgtcactgcccttacttggatggcatggtttccttttaccctctttgatactgattggatgggccgagaaatctatcgaggaagcccagacaacccaggagagacccanaggtaccatgatggtgtgagaatggttcctttggtcna

SEQ ID NO: 5729 - DNA, 265 bp, Zea mays
  misc_feature: Incyte ID No: 700457584H1
  unsure 17, 71: a, t, c, g, or other
agatccactcgccctcnccgccctcgtgcccctcagtccctcactccctcgcctcctcagcggcgaagacngctgcgaacggggccatttttaggcgggagcgcgggcggcggtgctagcagattggttggtttgagtggttgggccggctcttcgaaacgccccgcggcggcgatgggatgcttccattccacggccaagcggcagcatcctggctacgaggaccccgtggacctcgcctcccagacctccttcagtgttagtg

SEQ ID NO: 5730 - DNA, 266 bp, Zea mays
  misc_feature: Incyte ID No: 700457585H1
  unsure 19, 35, 174: a, t, c, g, or other
ttccttttaaatctaagcntaaggacacagcgaanagaagaaagcaccagttgaaaacagggtgcctgtaatcatgcagcctagtgagaagaagacacacgcagctatacaacagctaaggctgataaaacacgagaaggcaaagaagaagaaaattaaggaacaacagaaganaaaagcatacgaggcagagaaagccaagaccgagctactgacgaagaagcgccagagggaagagaggcgtgtgagataccgggaagaagata

SEQ ID NO: 5731 - DNA, 260 bp, Zea mays
  misc_feature: Incyte ID No: 700457589H1
  unsure 254: a, t, c, g, or other
tccctggccgtgtccaacgagtagtaattagtttgtgcccgtgtccgtgtttggttgaataataaattgacgaaagagggccaagtatagcttagagagagaagctagctagctgaaatggaggctagcagccgccgccgcgtctctcttgtgccactgctggtggtgatcatcgggtgctgtgcctgccgcgcccagatcccgatcccggcgaggacggacgggttcgtgtacggcgggaagccgccggcgtngggcga

SEQ ID NO: 5732 - DNA, 122 bp, Zea mays
  misc_feature: Incyte ID No: 700457593H1
gtcctttacgtgggttttgtggtgacgggactgtcccattacctccaagcatggtgcatggagctgaaaggccccgtgttcctggcgatgacgaacccgctctgcttcgtcttcaccatatt

SEQ ID NO: 5733 - DNA, 94 bp, Zea mays
  misc_feature: Incyte ID No: 700457595H1
  unsure 21, 23, 31, 40, 43, 57, 77, 79, 82: a, t, c, g, or other
cagccagctcttgcggtcgtncntgcagccngcgtcgcancgnattcgcattctagngattcgaagctgctactgcntncgncaggggaccatg

SEQ ID NO: 5734 - DNA, 106 bp, Zea mays
  misc_feature: Incyte ID No: 700457602H1
  unsure 46, 56, 61, 84, 98: a, t, c, g, or other
tgcagctggtgagcctctcgtcgatgattggagctgtactcaagtnccagcggttncgtanctttttgagggcgcaatgttggncgttggccgcagtnatgaggat

SEQ ID NO: 5735 - DNA, 196 bp, Zea mays
  misc_feature: Incyte ID No: 700457603H1
  unsure 55, 72, 92, 116, 129, 145, 148, 156, 162, 170, 178, 180, 187: a, t, c, g, or other
cttacccagttccatctggtgtaattccgaatccagtgatgaatagggctatggngtatcactaccagtgancccttaccggcattcaaggncgtgcccatgtacaggaagcagantttgtttgtcaanaaggtgagcctatgtngcnctgtgtangacttngtggatcnaactagancntcagggnaaggggggt

SEQ ID NO: 5736 - DNA, 196 bp, Zea mays
  misc_feature: Incyte ID No: 700457604H1
  unsure 116-117, 158-159, 170, 174-175, 184, 190-191, 193: a, t, c, g, or other
gcggcggcggcggtgagcatggccgcgcagagggagaagtccgcggccgtcgcgtcggcccagtcacacggcgctgcggtatcggggtctccttctccttcgtctcatccggaggnncggcggcggcgtcctcgtcgggagagtcggtggagcgccgnnaatcgggaatntggnngattccggngccaanntngat

SEQ ID NO: 5737 - DNA, 197 bp, Zea mays
  misc_feature: Incyte ID No: 700457605H1
  unsure 14, 75, 103, 113, 122, 130, 133, 135, 154, 172, 174-175, 177, 180, 184,188-189, 193-194: a, t, c, g, or other
caccagcagcagcnccagaaatcgagcaaacacaagctgctccatggcctcaccaacccgaacaccatacgcctnccgccggcggtcgagcccatcgcgcctnctctctcttnagaacatcngcctgtgnaancncctcctgtgacggatcctnctcgccggagaacccagngnnantcnagcncttnntgcnncta

SEQ ID NO: 5738 - DNA, 265 bp, Zea mays
  misc_feature: Incyte ID No: 700457611H1
  unsure 63, 235, 238, 245, 263: a, t, c, g, or other
gcaagaactagtgttgccagtaccacagtgctgtcttcaacttcaggactcttcactcttttncattggtgttttacttggccaagactccataaatgctgcgaaaattattgctgttttcattagcatggctggcgttgtaatgacaactgtgggccagacttgggcatctgatgaatcagaagcaggcaaatctggttttacacagaggactcttctaggtgatatgttgggnctnatgtcanaaatcgcctaaggggctntt

SEQ ID NO: 5739 - DNA, 263 bp, Zea mays
  misc_feature: Incyte ID No: 700457613H1
  unsure 178, 190, 195, 201, 218, 223, 234-235: a, t, c, g, or other
ttggacaccgtcgaaggtgatagcgcgccttggcaaagaaataaatgatgaaagctcctatcctttattgggcatacaagaataacatccctgtatactgcccagcttgactgatggatcacttggagacatgctgttctgtcatgcagttcgtaatcctggccttattattgacatngtacaagatatncggcngatgantggggaagccatcccangccancaccagggaanncagggattatagttcttggtggaggcct

SEQ ID NO: 5740 - DNA, 262 bp, Zea mays
  misc_feature: Incyte ID No: 700457614H1
  unsure 113, 148, 160, 173, 195, 197, 217-218, 229, 233, 253, 256, 258, 260-261: a, t, c, g, or other
ggacgaggaaggcatgccggcgttcgcgctcgtcaacaaggccacggggctcgccatcaagcactccctcggccagtcccacccggtcaagctcgcgcctttcaacccggacnatgaggacgcgtcggtgctgtggacggagagcaangacgtgggcaanggcttccgctgcntccgcatggtcaacaacatctncntcaattcgacgcttccacgnngacaatgcccncggnggggtccatgaacggtacgnagntntnnt

SEQ ID NO: 5741 - DNA, 263 bp, Zea mays
  misc_feature: Incyte ID No: 700457618H1
  unsure 262: a, t, c, g, or other
acggacactatccacagataatgcaagatctcgtgaaggagaggctgcccaggttcactcctgagcaggctaaactggtgaagggctcggcagactacatcggtatcaacgagtacacatccagctacatgaaggggcagaagctggtccagctggcgcccagtagctactctgccgattggcaggttcaatatgtttttgcacgcaatggcaaaccgattggaccacaggcgaattctaagtggctctacatcgccccgang

SEQ ID NO: 5742 - DNA, 198 bp, Zea mays
  misc_feature: Incyte ID No: 700457621H1
  unsure 32, 94, 144, 157, 164, 173, 179, 187, 195: a, t, c, g, or other
tagattatgatatttctgtacagatgattganatatacaatgaacaagtgagagatctccttcaggatagtggaaacagaagattagaaattanaaatacatcacagaaaggacttgcggttccagatgcaagcatagttcccngtgcacatgctangtcctgntgtggttgnaacggntgactcanggccaaangac

SEQ ID NO: 5743 - DNA, 195 bp, Zea mays
  misc_feature: Incyte ID No: 700457625H1
  unsure 194: a, t, c, g, or other
tgaggtttttacatgatccatcaaaggacactggctatgttggctgtgctttaacaagcaacatggtgagatttttcaagaccgcggatggatcgtggagccatgaggttgctatctctgtgaaaccactgaaggtccgcaactggattctgccggaaatgccaggattgataactgatttcgtcatctctctnc

SEQ ID NO: 5744 - DNA, 194 bp, Zea mays
  misc_feature: Incyte ID No: 700457627H1
  unsure 155, 158, 191: a, t, c, g, or other
catttccaaacacattttctggattctcaagtggccagccgtgcattagtccattgactcgtcagtgtgcggcttctactgcaccggctaactcgcaaacaacttggacaatgcgtgctaccttccctgaatatgtggttgctcttactacaatngtnggatctgtgcttttcacgatatttggtggtgtngga

SEQ ID NO: 5745 - DNA, 175 bp, Zea mays
  misc_feature: Incyte ID No: 700457628H1
  unsure 113, 123, 169, 171: a, t, c, g, or other
caggcgtcttcgtactcgcctatctccgcgactcaaagcttcttccatttcctaccgccgccgctgcagcttccaccccattccgttcgacaccatgagggagtgctctcganccacatcggncaagccggtatccaggtcggaaacgcgtgctgggagctctactgcntncgag

SEQ ID NO: 5746 - DNA, 173 bp, Zea mays
  misc_feature: Incyte ID No: 700457629H1
gaaagcgtgttgctgtaaagtatttctcagatgattggccgactaatgcatcaaagttagcctacgaaaagtctgtttttactaaaactctaaagacaaatgcacggacagaagctgagataacattgtttgatggttatattgtcgtttacaagtttgtacatgaccttcac

SEQ ID NO: 5747 - DNA, 107 bp, Zea mays
  misc_feature: Incyte ID No: 700457630H1
tttattcagatcaaggttccttcgaagaaaaaagaggctcgggttacggtgacattggccaattgcaggttctgtcatgttgcttatgatgaaatatttggaacgac

SEQ ID NO: 5748 - DNA, 262 bp, Zea mays
  misc_feature: Incyte ID No: 700457631H1
  unsure 36, 109, 225, 228, 231, 238, 241, 243-244: a, t, c, g, or other
cgctcatcaaggccaacgacaccatcaagatcgatnctggagaccaacaagatcatggatttcatcaagtttgatgtcggcaacgtggtcatggtgactggcgggaggnacaccgggcgtgtaggagtcatcaagaacagggagaagcacaagggcagctgagaccatccacgtgctgcttggagctttttgctatgtctagttttctcctatttgttgtacagnaanccntggattngantnnaatttgggggtcccaaat

SEQ ID NO: 5749 - DNA, 192 bp, Zea mays
  misc_feature: Incyte ID No: 700457633H1
  unsure 13, 56, 99, 110, 127, 136, 141, 151, 178, 184, 186, 188, 191: a, t, c, g, or other
ggctgtggatgtngcagtgcaggacagggaaacgtacgggcaaaagtgccgtgaangatcgccgtggacatggttaacgagggcctggttgagccccgntcagcgatcangatgggtagacccaggnccacctggnccagnttctcgcatncctcatttgagaacccgtcggtcgtancaaggntnangtnt

SEQ ID NO: 5750 - DNA, 181 bp, Zea mays
  misc_feature: Incyte ID No: 700457637H1
  unsure 133: a, t, c, g, or other
gcctgcagccacgaactcccgttctccatttccagccatggcggtgtcgatcgagctcaccaaggagtacggctacgtcgtgctggtgctggtggcctatgtcttcctcaacctttggatgggcttccaggtncggcaaggcccgcagaaactacaaggtgttctaccccaccatgtacgc

SEQ ID NO: 5751 - DNA, 120 bp, Zea mays
  misc_feature: Incyte ID No: 700457638H1
  unsure 43, 55, 66, 68, 101-102, 105, 108, 111-113, 115-116: a, t, c, g, or other
gggagattggagagtattttcttcttctttacaagaacaactngttggatactgncacggcaaatncnaagatccaaccagtgggttgtaaatgttccaanntgngtncannngnnctac

SEQ ID NO: 5752 - DNA, 182 bp, Zea mays
  misc_feature: Incyte ID No: 700457641H1
  unsure 7, 176: a, t, c, g, or other
gcaaggnctacttcgaggaccgccgcccggctccaacatggacccctacgtggtcacctccatgatcgccgagaccaccatcatctggaagccctgagcgcggccgttgcgttgcgctgcattgcagatttgcagggtccccgaagcgattgcaaagccattgttccttccgttcngtttgt

SEQ ID NO: 5753 - DNA, 181 bp, Zea mays
  misc_feature: Incyte ID No: 700457642H1
  unsure 2, 165, 173, 180: a, t, c, g, or other
gnttaattgaggagtccaaggtttcaaggccattaccttggaggccagcgactaatgttttccgtgttaaagaggatgttcgacctatattctgggccaacagaccaaagagctatcttaaaaggacattaggttgggatcagtatccccatggacggtggggtnattctcgnaaccctnt

SEQ ID NO: 5754 - DNA, 152 bp, Zea mays
  misc_feature: Incyte ID No: 700457644H1
  unsure 5, 14, 45, 61, 64, 80, 93, 107, 112-113, 124, 138-139, 142, 144, 149: a, t, c, g, or other
gttgnttggctggntcgaaagcagtaaatcttctggagcaggganatatgattcttgctancancaaggagccaattacntgcttgccttgancattgagaagactngccannagttggaccantgccattgggtcanntgnanctgcntaa

SEQ ID NO: 5755 - DNA, 181 bp, Zea mays
  misc_feature: Incyte ID No: 700457646H1
gcaccaatcaatctttccgatcgtcttaatcaggttctccgttgggctcttgggtcagtggaaattctgcttagtagacattgtcctatctggtatggttacaatggacgattgaagcttttggagaggctggcttacatcaacactattgtatatccaatcacatcaattccgcttattg

SEQ ID NO: 5756 - DNA, 184 bp, Zea mays
  misc_feature: Incyte ID No: 700457647H1
  unsure 153, 177-178, 180: a, t, c, g, or other
gctgatcagctagctgaagctgcttgccagtcttctatttgtggtgttgagcttcgagctgcagcttctgctctcaagagacttggtgatggacctcgtgctcatagtttgttgctcagtgcacacaatcagagacttcagttaaacattcanacaatacaaccatctagcacattnntntggg

SEQ ID NO: 5757 - DNA, 259 bp, Zea mays
  misc_feature: Incyte ID No: 700457650H1
gttcccaccaaaccagcggcaccacccatggcttcggcggcggcgagatccggtctccggtcgctggcggcgcgcgccgccccgttgaggcgccgcatgtcctcctccgtccacgacgacgcctatgagacggccaagtgggagaagatcacctacgccgggatcgtgacctgcaccctcctggcggcgtacaacctgtccaagggccacccccacttcgatgagccgccggcgtacccatatctgcacatccgcaaca

SEQ ID NO: 5758 - DNA, 260 bp, Zea mays
  misc_feature: Incyte ID No: 700457651H1
  unsure 164, 215, 219, 229, 241, 243, 245: a, t, c, g, or other
atcatgttcgccatgacctcaatcaagggtgtcgggcgccgcttctccaacatcgtctgcaagaaggccgacatcgacatgaacaagagggccggcgagctgacgcctgatgagctggagcgcctgatgacggtcgtggccaaccctaggcagttcaaggtgcnggactggttcctcaacaggaagaaggattacaaggacggcaggttctcgcnggtntttctcaaangccctggatatnangnctcagggacgacttg

SEQ ID NO: 5759 - DNA, 178 bp, Zea mays
  misc_feature: Incyte ID No: 700457653H1
agcgatccgatccgatccggaactgtgccggccagccatggcgactagggttttgctcaccgccctcctcctcgccttcctcctcgtcgccacccctttcaccgcccgagttgctagagctgattcggaggaagatgctgctgcagctgaggttgttgaaggggctgatctaggtatt

SEQ ID NO: 5760 - DNA, 254 bp, Zea mays
  misc_feature: Incyte ID No: 700457654H1
gccggcgcctccacttcgcgttctcgcctcatctcctcccgctcaggatccggcggcgaaggtaaggcaagatgtacaccgcgaggaagaagatccagaaggataagggccttgagccctccgagttcgaggactccgtcgcccaggctttcttcgacctggagaacggtaaccaggagctcaagagcgacctcaaggacctttacatcaacggtgctatccagctggatgttgccgggagcaggaaggtgttt

SEQ ID NO: 5761 - DNA, 266 bp, Zea mays
  misc_feature: Incyte ID No: 700457656H1
  unsure 146, 166, 202, 208, 224, 235, 241, 248, 255: a, t, c, g, or other
caacctcagatgggcggcggcgacggcgtggacaagcccgagcacgacctgtgatcggcatttgatgctgtgcgtggctgaggagacagcagagcacgaccattttaaaagctgaagcaggcattgccactggctttccaagatgngagacatcacatccaagcgngattatctactactggtaatgcatcctcttcttctncccccnatgtgctggtgctatnttttgggcgtnctaggntgggacnggccggngcgatatggtt

SEQ ID NO: 5762 - DNA, 182 bp, Zea mays
  misc_feature: Incyte ID No: 700457658H1
  unsure 45, 60-61, 63, 79, 158: a, t, c, g, or other
gatctcccttcgcagccggccagggaccccttcacagcgcggganatggctgatgcaggnngncccatttgcagttgangcaccaaccccagttcttggagagccaatggacttgatgactgcgctgcagctggtgatgaagaagtcaagtgctcatnatggacttgtgaagggtccttcgc

SEQ ID NO: 5763 - DNA, 180 bp, Zea mays
  misc_feature: Incyte ID No: 700457660H1
cgatgacgttcctgagctcgtccctggagagacatttgaggaggctgcggaagagaaaaaggagtcatcatgattttgccacatgcccgcccttgtgaagggcttataagtaaagccttgcgtagaagggacctgttgagaactctgacctacattatttgtgcctgcgtacggttatgt

SEQ ID NO: 5764 - DNA, 260 bp, Zea mays
  misc_feature: Incyte ID No: 700457662H1
  unsure 126, 222, 252: a, t, c, g, or other
cgaggatgagctacgtgatgctgtgctgcttgttttcgccaacaagcaagatacttcctaatgccatgaatgctgctgagatcactgacaagcttggattacactccctgcggcagcgacactggnacatccagagcacttgtgccacaactggcgagggtctgtacgagggcctggactggctgtcccagcaacattgcgagcaaggcttgaatatcaaangcgaattgactaggagcccgggttttaccnggaaaacc

SEQ ID NO: 5765 - DNA, 262 bp, Zea mays
  misc_feature: Incyte ID No: 700457663H1
  unsure 56, 254, 258, 261: a, t, c, g, or other
caacctcagatgggcggcggcgacggcgtggacaagcccgagcacgacctgtgatncggcatttgatgctgtgcgtggctgaggagacagcagagcacgaccattttaaaagctgaagcaggcattgccactggctttccaagatgagagacatcacatccaagcgtgattatctactacttgtaatgcatcctccttcttctccccccatgtcctggtcctattttgggcgtgctaggatggacttggccggncgcnatnt

SEQ ID NO: 5766 - DNA, 267 bp, Zea mays
  misc_feature: Incyte ID No: 700457667H1
  unsure 21, 25, 27, 43-44, 87, 96-114, 119, 166, 175, 189, 213-214, 221,228-229, 232, 239, 253, 256, 258: a, t, c, g, or other
gccgtgtagacacaagaatanggtnancaacatcgacgtggtnnccaaggaggaggcccgggacttcatcgagcgggatcagacgtncaatgctannnnnnnnnnnnnnnnnnntgtantgattgatctgcaggcagatgctaacgcagacaggatagttcttgtngtgttatgnatattctggcctantgttgtaggctgtgtatatgtgtnntgcagtnaggtacnnatnggaccanctgtttggcgcacnacntngtgcaatgt

SEQ ID NO: 5767 - DNA, 186 bp, Zea mays
  misc_feature: Incyte ID No: 700457669H1
  unsure 61, 109, 117, 122, 138, 155, 158, 160, 181: a, t, c, g, or other
gacaagtgagccccactactcccaagggatgctgaattttgattataagggcaaagatttnagatctcaggttgcaattcggaaacaatggtttctatggagcaaactncatccagngtgtnagcaagaacctttccntgggaactgaagccttnggntngggcatcaaagggaagtctcngactc

SEQ ID NO: 5768 - DNA, 129 bp, Zea mays
  misc_feature: Incyte ID No: 700457670H1
  unsure 6-7, 18, 20, 32, 103, 108: a, t, c, g, or other
cgaganngccagcgagtnangccgtgcgcacncagcggcggcggccagggcccaggccccaggggatcggcgtgcgtacatggcagtatgacacaggattttnctgtncagtacgctacggttactggc

SEQ ID NO: 5769 - DNA, 187 bp, Zea mays
  misc_feature: Incyte ID No: 700457671H1
  unsure 28, 33, 57-58, 151, 171, 173, 182: a, t, c, g, or other
gctcgagatatcctagggatgtgatccntcatnctggccagcacctgaacttcactnntatcggagacagtatggacatgtgtggacatggtcactggttaagtagcaatgggaagatccgtccacatcaattcgggtaactggtgaagcncaagcacgtagtgaaggtgnancggaagtantcttc

SEQ ID NO: 5770 - DNA, 241 bp, Zea mays
  misc_feature: Incyte ID No: 700457672H1
  unsure 20, 40, 44, 59, 77, 84, 100, 109, 114, 123, 128, 131, 141, 146, 150,162, 165, 209, 217-218, 225, 227, 232: a, t, c, g, or other
gccactcaacccaaccttcnctttcctcttctcctctgtnctgnatctgttctaccctnccgttccacttcgaaagncttactnctggttttcagatcgncaaaactcncccgncgggttcgncgggnatncaaaggaagnccagnagangcgggtatcgcnagncgagccgttgccggcccggaagatccgaagaacccgtaaggctnagggtttnnaggtcgncnggggntgtcggtgg

SEQ ID NO: 5771 - DNA, 180 bp, Zea mays
  misc_feature: Incyte ID No: 700457674H1
  unsure 76, 124, 150-151, 154, 172, 177, 179: a, t, c, g, or other
gagaggtggagaaagctgagtccctattgcacaagctatctctgaagaacaacgtcaagcccagttacagcttcanacatgacactgcttgatagctactcgaagaaaggagacgtccacaacncggagaaagtgttcaacaggttgagnnggntgggctacactgggaggntcggntnt

SEQ ID NO: 5772 - DNA, 181 bp, Zea mays
  misc_feature: Incyte ID No: 700457675H1
  unsure 2, 45, 65, 79-80, 94, 96, 102, 113, 115, 139, 166, 175, 178: a, t, c, g, or other
cnacgggttacttgatctcaacttcccaccggctgcagcggaggntacctgaaccaagcttgacngcgaagtgatgaanntggggctctgtacngnttcatncaatgtcaatntntttttttcccccaagcttaccaanggagtcttgaagcaggagtcgggtttnctatcaggntantag

SEQ ID NO: 5773 - DNA, 185 bp, Zea mays
  misc_feature: Incyte ID No: 700457676H1
  unsure 24, 32, 47, 71, 79, 94, 105, 117, 121, 155, 161, 163, 166-167, 183: a, t, c, g, or other
ttgagatcacgaggagtaagcgcncgcctggnaccctgtcgattgancacgacgtcgtgggcagcattgantaaaaggncaaagtcctctgagncaccagaacancgatggcgctgnattntcaaggaagtaatggtcaaggcgacgcggattcnaaccancntgnnaagttgcgattagccngg

SEQ ID NO: 5774 - DNA, 102 bp, Zea mays
  misc_feature: Incyte ID No: 700457679H1
  unsure 86: a, t, c, g, or other
cctatctggtataggacggagctgagcttctagcaacgtacagtgtatccgccatgagtcctttcggggcggtgatcacgccaganaccctcaagtacatgt

SEQ ID NO: 5775 - DNA, 259 bp, Zea mays
  misc_feature: Incyte ID No: 700457680H1
  unsure 9, 29, 40, 44-45, 57, 61, 75, 92, 108, 114-115, 122, 151, 165, 169, 173,211, 213, 215, 228, 230, 243, 246, 251, 255: a, t, c, g, or other
aacctcagntgggcggcggcgacggcgtngacaagcccgngcannatctgtgatcgncatntgatgctgtgcgtngctgaggagacagcagnccacgaccattttaanagctgnngcaggcnttgccactggctttgccaagatgtgaganatgcacatccaagncgtnattntctactacttgtactgcatcctctgtcttctcccccangncnggtctattttttngnccagctaggtggnctngccgncgcnatat

SEQ ID NO: 5776 - DNA, 114 bp, Zea mays
  misc_feature: Incyte ID No: 700457682H1
  unsure 14, 16, 18, 24, 38, 43, 53, 78, 90, 93, 98: a, t, c, g, or other
ggaggatgcagctnantngaagcntcacgggacctttnttacnttcagatacngaatggggtgattcttacatatgcnagttctctcagngancagtnatctacaatcagtgcc

SEQ ID NO: 5777 - DNA, 264 bp, Zea mays
  misc_feature: Incyte ID No: 700457686H1
  unsure 33, 72, 86, 152, 262: a, t, c, g, or other
cccaaagccgctcggttcgctcacctgcctgtnttgccttgcgacttgcgagtgggcggccgagtgcccgantcggtgcggccgtncaggagcgtttgctgtctccgtttccggcccgttccctttcgtggactgttttggaaggcgttgcnatgagacgctgcggtggcggcggcgaggagtgcatccctcggcgatgagcagaatcaccaccggatcttaatctcccttgcctcgtttgcggcgagcttgcgtgttcggngg

SEQ ID NO: 5778 - DNA, 256 bp, Zea mays
  misc_feature: Incyte ID No: 700457688H1
  unsure 43, 54, 159, 184: a, t, c, g, or other
ctagattggtatcgaatacaattcttccaagagatatacgtgnactgggttggngtcatgttccagcatattttaatgcaagatgcggtcgctggcgctcatgctgacgtggtccgtcgccaccgtgctcactctcctcgccgtgggctcgccccatcnaccacctcagcaatgctagaacggnaaaccaggttgtgcaaaagagtacttgcgatttgaaggtcttatggtcagtaatagaggatatgacgaagta

SEQ ID NO: 5779 - DNA, 208 bp, Zea mays
  misc_feature: Incyte ID No: 700457690H1
  unsure 14, 37, 39, 83, 106, 136, 153, 157, 172, 175, 180, 182, 187, 195, 198,205: a, t, c, g, or other
tctgcttcccaganacccagccatggcgatctcccananctcacgcatattcctggccatccttctcctggccgccgccttcnccgccgccccagctgcgcttgcngacggcgacgacgtggtggcccttaccgantccacgttcgagaaggnggtntgaaaggccggggcnccnaggangnttttnaggccccntgnttgtggncca

SEQ ID NO: 5780 - DNA, 252 bp, Zea mays
  misc_feature: Incyte ID No: 700457691H1
  unsure 24, 36, 43, 62, 86, 150, 163-164, 200, 203, 211, 217, 219, 237, 250: a, t, c, g, or other
ggcgaggcgacaccagcgaggagncgaaatcgtttnaaggcgncagttgtcttctgttccanttgtggtttcatttcctctgcaancgattccattttttctgtacgccgtcagctgatccttttcgccgtagtatccccgagcaaaagncaaaaccctttgnnttgtgcgctgtgctgtttcgccatctctgttcgtcncancgaggcancgactnantccccattcttggcatcnggcttcacaaaanaa

SEQ ID NO: 5781 - DNA, 208 bp, Zea mays
  misc_feature: Incyte ID No: 700457692H1
  unsure 204: a, t, c, g, or other
gggccctttgccggtgcaggcggcgcagacccaccgcaccaggctataaatggcaggaaggcaccgggcaccccgacaataccatgatgaacctcgaggataccgtgatggtccaccacctccacttccacgaccaagacctctctcaccgcgtcgcatggcagaggaactgtctaggcgccgtgctgagatccgtagaatccngagg

SEQ ID NO: 5782 - DNA, 129 bp, Zea mays
  misc_feature: Incyte ID No: 700457693H1
  unsure 51: a, t, c, g, or other
gaaacccaaaatccccaccgaacgcaacctaaaatctccccatccctcctncgatccagccccgcggagaagagccatggccgattccgcaaccaacgacgcccccctggtcgccagcaaccagcccac

SEQ ID NO: 5783 - DNA, 155 bp, Zea mays
  misc_feature: Incyte ID No: 700457704H1
  unsure 24, 28, 47, 52, 127, 137: a, t, c, g, or other
agtcttcagctcctccgatccagntggncagggagccaaggcccagnaggcngacaaatcgaaatccaagaggagatggccatttggaaagtccaagcgtcggagccttccatatcgaaggtgccangcatgctacnagacagtagctaccgttg

SEQ ID NO: 5784 - DNA, 279 bp, Zea mays
  misc_feature: Incyte ID No: 700457705H1
  unsure 11, 164, 185, 194, 211, 250, 270-271, 273-274, 277-278: a, t, c, g, or other
cacattctaanaacctggggaaagcagaacagccttcacttgacttgaacttagaacatagcaaatatgcaaatttgaatgagcaacttgtggaagcaagccttcgactcaggcagatgagaggtgaagaacttgagggattgagtgttgaagaactccagcanttggagaagaatctggaatcnggtctgcanagggtgcttcaaacaanggatccaacatttcttggaacagatcagcgcacctcaancgaaagggtacacaactggnngnnggnnt

SEQ ID NO: 5785 - DNA, 270 bp, Zea mays
  misc_feature: Incyte ID No: 700457707H1
  unsure 80, 217, 220, 243, 248, 268: a, t, c, g, or other
ctgacatggatttattccttgggaacctgcaacatcaatgctaagtttgatgctaaacctattgagctcattgttacganatatcaggctgcattactactactgttcaatggatccgaaaggcttagttattctgaaattgcaacacaattaaacctgtcagatgatgatgtagtgcgtttgctccattcactttcttgtgcaaaatacaagatcnttngcaaggaaccagcaaatagatcnatctngcccaatgatgttttggagncc

SEQ ID NO: 5786 - DNA, 55 bp, Zea mays
  misc_feature: Incyte ID No: 700457708H1
  unsure 3, 5, 26, 29, 44, 53: a, t, c, g, or other
ctngncgccgttttatgccttcacangcngctgaagaagctcanacagctatncg

SEQ ID NO: 5787 - DNA, 265 bp, Zea mays
  misc_feature: Incyte ID No: 700457709H1
  unsure 2, 6, 65, 67-68, 71, 96, 115, 175, 198, 203, 236, 251: a, t, c, g, or other
cncganccgggttaatgccttttacaacaatgggtagaagaccattcatttttggcagaaatacnannccnaattattgggatgatggatatttcngctatgtgaagcagaaggntggtgagcctgttgagaatgaggatgctgagccaaatgtggaggctgtgtaaacattctnaagcatcctttgcaaacgctccnttcantttctctggtgcctcatgacacaagtcacaggnggctgttttgcgtcntcagatcatagcgt

SEQ ID NO: 5788 - DNA, 273 bp, Zea mays
  misc_feature: Incyte ID No: 700457711H1
  unsure 46, 129, 170, 211, 218, 221, 239: a, t, c, g, or other
caaacctcgaaagattcccaaagctgaccctctagaaagccaaganaactcactcctactctactctactctcctactcgcctccgtcggccgtcgccatgaacccgcgtcctcctccccctgcttctnctgttggcgctgcctggtgcgtatgcacgcccggcgcggcngtatttgggacagtgtccggggctggagtacaggctgccgncgttcgncgncgcgctccgggcaacctnccccgtctcgacggaggggtactcgtccccctac

SEQ ID NO: 5789 - DNA, 170 bp, Zea mays
  misc_feature: Incyte ID No: 700457713H1
  unsure 11, 20, 54, 71, 98, 141, 160: a, t, c, g, or other
ggtggtcgggntctccggcntgggcggcagcggcaagaccacgctcgccatggnggtcttcagggatcacnaggtccgagcctacttcaacgacaggntcttcttcgagaacgatctcgcagtccgcaaatctggaggccntcaagatgaagctgtgggngcagatccgc

SEQ ID NO: 5790 - DNA, 146 bp, Zea mays
  misc_feature: Incyte ID No: 700457717H1
  unsure 30, 34, 42-43, 49, 83, 86, 94, 106, 116, 118: a, t, c, g, or other
cccttgtccagtagctatacaatctttttnatcnactagagnncagccntacccaattgaggcagcacctggcgctcaaaggntcnttgcgccnaccgctgatgcnggccagtttngnggtgatccctgcggggtctcaagttgtt

SEQ ID NO: 5791 - DNA, 197 bp, Zea mays
  misc_feature: Incyte ID No: 700457720H1
  unsure 27-28, 128, 131, 143, 187, 194: a, t, c, g, or other
ccgaaagccagcgaccgtggccatgcnntcgccggagctctcctcttcctccccggttctcctacaatatagggggcaagaagtacgcgacaaccgtggagacgctgatgcagcgggagcccgactcnatnctcgccgccatnttcagcgggcggcacacgctccatgatcacccaaccacgggganggggatnttt

SEQ ID NO: 5792 - DNA, 271 bp, Zea mays
  misc_feature: Incyte ID No: 700457722H1
  unsure 15, 21, 42, 86, 96, 196, 251, 263, 266: a, t, c, g, or other
caatcaggttctgangttcantctaaccgagtccgggcttcnctgtgtcttgccatggctgacaatggctgtcttacgcgaatatnggtggatggnttgctgatactcttgttcaaagagggatctcagttacaaacgttcgtaagatcatgcaatcaattggtttccttggaccagccatgttcttaacactgcngagcaaagttcgtactccagccaggctgtattaggtatggcatgcagtcaggtancggatgcttttncanagtct

SEQ ID NO: 5793 - DNA, 266 bp, Zea mays
  misc_feature: Incyte ID No: 700457726H1
ctgcaatgtcatcggtagtccagatgagcaatcttggcctcaaggattgtccacttgcagaagcaatgaagtatcagttcccacagatcaaaggcagtcaactggccgaggtgatgacaacagccagtagcgatgcaattgacctcatctcatcactatgctcatgggatcctagcaagagaccaaaggccgcagaagtcctccagcataccttttttcagggttgtacatgtgttccactccctgtccgtccaaaagttcatcat

SEQ ID NO: 5794 - DNA, 263 bp, Zea mays
  misc_feature: Incyte ID No: 700457727H1
  unsure 9, 22, 30, 99, 142, 159, 237, 243, 246: a, t, c, g, or other
attgtgttnaagatgaccaaangttgctgntctatgaattcatgcctacgtggcagtttggataaccatctttttagaaggtctcttcctactcccatnggcaatcagaatgaaggttgcactcggagcagcaaagggtctngctttccttcatgaagnagcagaaagaccagtcattatcgcgatttaaaacttgcacatactgatggatgcggagtataacgcaaagctctactnattttnggntgcgaaagacggactgt

SEQ ID NO: 5795 - DNA, 268 bp, Zea mays
  misc_feature: Incyte ID No: 700457732H1
  unsure 38, 117: a, t, c, g, or other
ggcgtccgcggagacgatggcgacggagaagctgggcntcaaggtggagcgcaacccgcccgagtcccgcctctccgagctcggcgtccgccagtggcccaagtgggggtgcgagangagcaagttcccgtggacctactccgccaaggagacgtgctacctgctgcaggggaaggtgaaggtgtaccccgaaggccacggggaggagttcgtggagatcggcgcgggagacttgtcgtcttccccaagggcatgagctgcactggga

SEQ ID NO: 5796 - DNA, 232 bp, Zea mays
  misc_feature: Incyte ID No: 700457736H1
  unsure 6, 25, 29, 36, 42, 53, 67, 76, 90, 93, 134, 148, 151, 159, 161, 181,192-193, 217, 223, 227, 231: a, t, c, g, or other
cggacncgaggaaaggttcgcttcntgtngaaagtngatatncttcgagtgcnatggccgatccggnggaggagancgttgtctcgccgncancgaacccctggcggccccagaccgtgggcgccttagacacncccctgcaacctgntgntgacagancntacaaggagaaggtgtctgntccggcgacgnngtaaagtcccggggattcaagttntggaanaagnattnc

SEQ ID NO: 5797 - DNA, 85 bp, Zea mays
  misc_feature: Incyte ID No: 700457737H1
  unsure 2, 4, 6, 24, 28, 60: a, t, c, g, or other
cnangnggagttcccaatcctacncttnacgccgatttctcaccagctcgcgggagttgnggccgtggaggtgcaccggtgggcc

SEQ ID NO: 5798 - DNA, 276 bp, Zea mays
  misc_feature: Incyte ID No: 700457738H1
  unsure 5, 17, 24, 26, 52, 88, 99, 102-103, 114, 127, 177, 182, 187, 193, 229,238, 242-243, 256, 264, 267, 270, 275: a, t, c, g, or other
tactntctcttcttggngcctggngnagaggaaggatcagggaacgggggangaggttgctgccacagctcaggtactcaagtttggnttcagacaagnagnnaaacaccagtnggttaagatggcngctggtttccagatcggtgtgatcgggtacacttgacactctctgttgcntcttncagtntccatngtcctctggcaacaaagctctacatcagcacacttngtttgcccntcgnnaataacattaaanagctggcntcngcnggtgnc

SEQ ID NO: 5799 - DNA, 263 bp, Zea mays
  misc_feature: Incyte ID No: 700457740H1
  unsure 3, 16, 62, 65, 68, 92, 150, 229, 239: a, t, c, g, or other
gantccgagggttcangcgaccgacggcgaacatggcggcggacggcggcccagcgacgtcngcnctngaagaggccctcaagcccttccangaaagagcctccgaggctgagatacgcatagcgaagtggaagccttgctgtacaacanagatggtccgagcggtggatccgaggcaacttcctctgccgtgaaggatctccagtcgaagctagatgtggttactgcngaatgcttgnctgaaaaggagaagaacaagaagt

SEQ ID NO: 5800 - DNA, 266 bp, Zea mays
  misc_feature: Incyte ID No: 700457742H1
  unsure 67, 86, 142, 180: a, t, c, g, or other
ggcaaagcagctccagggtgagaccaatataaagccattgtggggtactgcacagctactttatgcntcctcgttacatgcacggngctgctactagcccagaggttaaagtatatgcatatgcggctgcacaagttaaganagctttggaggtcactcactacctaggtggtgaaaacnatgtgttttggggtggaagagagggttaccaaactcttctgaacactgatacttaaagagagaacttgaccatttggctaactttc

SEQ ID NO: 5801 - DNA, 261 bp, Zea mays
  misc_feature: Incyte ID No: 700457743H1
  unsure 107-108, 122, 199: a, t, c, g, or other
gaacgttataaagatgaccttttgagtatttctacaaagtcctcaaaagaatctacatggtgtagctgagcttggtgcaattttggctgctgcatgcatttgcaaannggaacacattacantaaagaatcactacgagccaacaagtcactatctgtatggtacaataatccacctttcaggatgcatcattggatangcatcccctggatcttgagttggaagagaatgatggattcagtgagaaacttcttaaatgtt

SEQ ID NO: 5802 - DNA, 263 bp, Zea mays
  misc_feature: Incyte ID No: 700457744H1
  unsure 22, 50, 142: a, t, c, g, or other
gcaggcgcggcgagcgcaaaancaagacaaagccaaagcaaaagcttgcncagctatcaacctcggggaacgtgctgggtagagtcgttgagccattttcgtctccaacagtgcaggagccccctgaacctgcaagcgaganaaagacccagcatccaactaggggtgcttccagcagcgctgcccagcggcttaccgtggacgctggactgccagtgttgcctgggttagatgacatattggacgtcccggaagggcttgac

SEQ ID NO: 5803 - DNA, 81 bp, Zea mays
  misc_feature: Incyte ID No: 700457750H1
  unsure 2-3, 26, 68, 76: a, t, c, g, or other
gnngcgagcgaccgcaccggcacggngcccatccatccatcgccatcctctagcccagtccaaagganccctagcnatgag

SEQ ID NO: 5804 - DNA, 273 bp, Zea mays
  misc_feature: Incyte ID No: 700457751H1
  unsure 15, 18, 23, 38, 83, 119, 151, 174, 184, 204, 229, 249, 255, 263, 269,271: a, t, c, g, or other
cttcaagccattggnttnttggntgatcttgacaaggngcttaacacttatgccatgagagttcgtgaatggtatggctggcnctttccagagctcaccaaaatagttacagataatanacagtatgccaaagttgtgaagatgatgggcnacagagttaatgcggtcaacctngacttctacngagatattgtcagatgaagnagctagacacacagctaaaggaggncagcatagatatcctggggnacgggnttgttgancttgantntc

SEQ ID NO: 5805 - DNA, 259 bp, Zea mays
  misc_feature: Incyte ID No: 700457758H1
  unsure 28, 157, 172: a, t, c, g, or other
taacgctctgtgctttgtgccgcttgtngcgtcctcaccgaacctccgctccctacaagatactgcggtgctccggcgcctgggacctgccattggaggtcatcgctgcacgtgctcctggccttgttgagcttcaccttgagaagctacaggttgncgaccgtgggcttgnggcgctttccgcctgtgccaacctggaagttctgttcctgtcaagacccctgagtgcactgattcaggcatcatcagtgttgccgag

SEQ ID NO: 5806 - DNA, 261 bp, Zea mays
  misc_feature: Incyte ID No: 700457760H1
  unsure 50, 75, 147, 199, 214, 239, 245, 249, 256, 260: a, t, c, g, or other
cctttcacagtttccctcccccaaaactactttcccacaaacccagaccngagcagcttgcgtctatcgtttctnttcttgttggccttctccttgccttgcttttgcttgctcgttgcttcttgagctcgagcccgccccttctgngccttgcccaagtctctgtgtgttttttcataggcttgagagttggaatagnggggggtggaggaancggaagaggagcttcgatttgtgtnctaggnggantccatgncccng

SEQ ID NO: 5807 - DNA, 81 bp, Zea mays
  misc_feature: Incyte ID No: 700457761H1
  unsure 18, 79: a, t, c, g, or other
cttcgtacgatgcttganttgggaccctttgtaccgttttacctagaactactgatgctgtatgcaactgaaacaagtnaa

SEQ ID NO: 5808 - DNA, 261 bp, Zea mays
  misc_feature: Incyte ID No: 700457763H1
cttcttcgcagttatttgtggcataaaaagagatctaactgggacactattttatttttcctttgaaaggtcttgattaagcctaaagatcaaaatgttgcactaattgtcacaaaaactaatttcaagcatctgtaagtacactgctgattcggttttttttcactttaaatgctcatgtgttttagttggatgtaacccatcaaccatactgcatatgattttgccatagcacataacattggcacttgttgaaaccat

SEQ ID NO: 5809 - DNA, 277 bp, Zea mays
  misc_feature: Incyte ID No: 700457767H1
  unsure 20, 160, 179, 231-232, 259, 262-264, 273: a, t, c, g, or other
ctcaaatgataccgccaganggcctccttccgtaaaggcttctttgtctgtactcctttggtcagcgcgctaccacaccgtgcatccacaagggattcttccccggtccgaagaacgttaccttccaaacaggacaaggaaggtgaccgtgcgaaatcgncaccgatgaagcaccggantacggagctctgaagcgtgatcatgatttggagagggaacgctcggatcgtnnaagtggacaagggcaggtaataacaanaannngggcgccgncccc

SEQ ID NO: 5810 - DNA, 220 bp, Zea mays
  misc_feature: Incyte ID No: 700457770H1
  unsure 18, 24, 31, 93, 141, 150-151, 165, 185, 208, 211, 218: a, t, c, g, or other
cacccctacaggtcaggnagaggnggagggnaggatgtcgcaccgtaagttcgagcacccgaggcacggctccctacggcttccttcccaggnagcgctcctcccgtcaccgcggcaaggtgaagtcattccctagggatnaccccaagnngccttgccatctcnctgccttccttggctacaangctggcacgactcacattgtccntgnggttganaa

SEQ ID NO: 5811 - DNA, 261 bp, Zea mays
  misc_feature: Incyte ID No: 700457772H1
  unsure 17, 70, 114, 131, 186-211, 249: a, t, c, g, or other
cccgcacgtcgcggagntcgtcgtgcccaccgccgcgcactgggccgacaagtacaacagggcggtcgcngccgccgcggagcacggctacgcgggggccaagtacctccccgncatccccaccgaacgcntcgccaaggtgttttcgtcggcgccagaggccgagccgctggcagagggccagtnnnnnnnnnnnnnnnnnnnnnnnnnncgagcttcgtctttgccggtggtgactctggatttggntcaccttccgaa

SEQ ID NO: 5812 - DNA, 260 bp, Zea mays
  misc_feature: Incyte ID No: 700457774H1
  unsure 37, 170, 200, 206: a, t, c, g, or other
gccggaggtggaagccattcgttccgtcctgaaaganagtgaggcgcttctcaagaagctggagaaccaggaaactggggcacgccaagagctcagcaagagagcaaaggagctgcacgacaaggagttcaagctaccataccagaaacccatgccctgcacccaggagngggcaggctgccttgagtgttacaagaccnatcacnaaggacccgctcaagtgtgctgaagcagttcaagagatttgaggctgtgctctc

SEQ ID NO: 5813 - DNA, 264 bp, Zea mays
  misc_feature: Incyte ID No: 700457776H1
  unsure 35, 47, 53, 85, 208, 248, 262: a, t, c, g, or other
ctttccctcgcgccgccgccaacgcaacccttgcngccccaatcccncacagnaaccatggctggcgcgcaggagtccctctacnctggtgggcacgatgcgcggccacaacggcgaggtgacggcgatcgcgaccccgatacgacaactacgccgttcatacgtctcctacctacccgcgacaagtccctgctggtgtgggacctgnccaacccggtccactccaccccggaatccggcgccaccgncgactacggcgtcncc

SEQ ID NO: 5814 - DNA, 268 bp, Zea mays
  misc_feature: Incyte ID No: 700457777H1
  unsure 4, 19, 27, 29, 37, 40, 52, 56, 73, 190, 203, 212, 220, 246, 254-255,260-261: a, t, c, g, or other
tggngcgcaagcgcatcanaatgtgantnggccaggngangcttcgcatgcnaatnttggtgaagcgttttcnggggttgcaggtggcactcctttttcagttgagtccggagttagactattgccacttagaacagtggttgccatgcctgctggcatcagtcgtgactccattcagggtacgtactantggtgggcttggnattatctanccattctncactaagggttcgacaaaagggcaanacaataannggtanntggctac

SEQ ID NO: 5815 - DNA, 255 bp, Zea mays
  misc_feature: Incyte ID No: 700457778H1
  unsure 32, 110-111, 147, 200-201, 214, 237: a, t, c, g, or other
caaactctcttactacatgctgatgggaagangcatagggcaaaggcgaaagccttccatgtgtctcagaaacaaaaagatggtgcagaacaaactccagatgtgaaggnngctggagttgtacccacaaaagaatctgctcaagtnaatggtggcgtgagtggtgatctgaaagacctgaagataaagatgctgggaannggaaacgaatggntgacatgaccatagagccaggtnacacaaaaagacattgac

SEQ ID NO: 5816 - DNA, 261 bp, Zea mays
  misc_feature: Incyte ID No: 700457780H1
  unsure 10, 13, 84, 151, 166, 172, 175, 216, 231, 236: a, t, c, g, or other
cggctgattngtnggtgggagatcgaggtcgcgcccttgccccacacgccactaaaggccgcgccgacgggctcatcaggcgcnctggacgggctcgcttctgccgctccgcgcttgtgcggtgggtgaagtgctggtgctggtgcgggangcgtcgccaaacctngcgggngcngaccttggtgggggagcgaggagtcgaaacaagaaccatgngtgaaacagggcacnctgtncaagtcactaacctctcgagcagag

SEQ ID NO: 5817 - DNA, 272 bp, Zea mays
  misc_feature: Incyte ID No: 700457781H1
  unsure 18, 77, 182, 189, 226, 239, 256, 261, 267: a, t, c, g, or other
acccaacttctgcaaatnctgaggttgaaggagcgtttggggataatgatcctgttgatgttgttgagatcggtganagacgtgccaatgtcggggatgttcttaaggttaagccattggcagctttagcaatgattgatgagggagagcttgactggaaaaattgtggccatttctttggntgacccnaaaagcatctcttgtgaaacgacgtagatgcatgttncaaaggcttttcnggggacatgacggccancaganactggntcagc

SEQ ID NO: 5818 - DNA, 267 bp, Zea mays
  misc_feature: Incyte ID No: 700457782H1
  unsure 6, 48, 114, 125, 148, 193, 203, 210, 253, 261, 265-266: a, t, c, g, or other
gttggntcaatatgtatgcagattagatgtatatagtaataattaagntatactacatcgatttgcatacgccttctctacagttatgcacttatgctccaagccttgttccgntcaagtttgcntcacatagtaaaacatgtctccngttcacttgaaacctaaactgttggatatgcagtttaagttcctncgtgttcacntttgtcnaaagttatggtttgttgtaaagagtgactttgcaaagatgcanccccctgnccannc

SEQ ID NO: 5819 - DNA, 255 bp, Zea mays
  misc_feature: Incyte ID No: 700457787H1
  unsure 2, 4, 9: a, t, c, g, or other
cngnataanaactgcacctcttcatgcctcagcaaattggtatttggagaatgtcagtacctatcctgcaaagctatgggattgttgcgatcgctcccttttctcaccgccttgcatttgatgatttgcctgtggatcttcaacgcttgcgttgtaaagttaacttccaagctctggtctccgttctcacattatctcacttggagaaacattgtgaagcgcttgaggtctccggtccgggttcatccagtaaat

SEQ ID NO: 5820 - DNA, 259 bp, Zea mays
  misc_feature: Incyte ID No: 700457791H1
  unsure 175: a, t, c, g, or other
catgaacatcgacggcgacaacggcctcgcctgcctcaccaagatctccggcgcctcctccgcgtccacggtctacgccgctgccccacatgttcgtcgtcaaggacctggtggtggacatgaccaacttctacagccagtacaagagcgtcgagccatggctcaagcgcaaggnccagcccccgcagcagggcaaggagatcccgcagaccaaggccgaccgggccaagctacgacggcatgtacgagtgcatcctct

SEQ ID NO: 5821 - DNA, 255 bp, Zea mays
  misc_feature: Incyte ID No: 700457792H1
  unsure 26, 108, 144, 231, 247, 253: a, t, c, g, or other
cgaggtggcgccaagaagcgcaagangaagacgtacaccaagcccaagaagatcaagcacaagcacaagatggtgaagctacgcagtgctgcagttctacaaggtggncgacgccaccggcaaggtgacccgcctccgcaaggngtgccccaacaccgagtgcggtgcgggtgtcttcatggccaaccattcgaccgccataatgcggaaatgcggcctcacctacgtctnaaatcggaaggcgtantcccangc

SEQ ID NO: 5822 - DNA, 259 bp, Zea mays
  misc_feature: Incyte ID No: 700457793H1
  unsure 31, 42, 152-153, 165, 171, 180, 198, 208, 215, 220, 245, 252, 255: a, t, c, g, or other
ccttctcgccgccgctgatgctccgcctggnagggtcgctgnaggacaaggtggtgtacggcaccgcgagacctcgggcggccgtgcgcgccgttcgccaagaacgcgtcggagatgcacggcttcacgcagggctgcctgaccctgcgaanntgggacgagctncaacgnccttattcnagaaatctggtgccaggntcgtgttcgngatcaangcgcnaaatggccgtgttccgttgaccggntggatcnatnggag

SEQ ID NO: 5823 - DNA, 258 bp, Zea mays
  misc_feature: Incyte ID No: 700457795H1
  unsure 30, 217, 244: a, t, c, g, or other
cgtcgtcgtcgctttgctccagcttcgccnccctgcggaccgcctccatcggccacccccgtggcatcgcctcctccacgcccaggaaggcattccatgtgagggcatcagctcgggttgacaaattctcaaagagtgacatcatcgtgtccccttcgattctgtctgcaaactttgcgaagttggtgatcaggtaaaagctgtggaggtggcaggntgcgactggattcatgtcgatgtcatngacgggcgctttgt

SEQ ID NO: 5824 - DNA, 259 bp, Zea mays
  misc_feature: Incyte ID No: 700457796H1
  unsure 5, 31, 108, 157, 191, 193, 238: a, t, c, g, or other
ggccntgctgatgaagttgtggaggaaaganttgctgacgatgatgttattctggtgaaaggcacaaagaacaccagcgcggtctctataatacttaggggcgcaaangactacatgcttgatgagattgaacggtccttgcatgatgccctgtgcnttgtgaagagaaccctggaatcaaatatggttgntngctgaaggtggtgcagttgaagctgcgctgtcagtttatctgganaacttgcaacaaccctgggtt

SEQ ID NO: 5825 - DNA, 274 bp, Zea mays
  misc_feature: Incyte ID No: 700457802H1
  unsure 4, 59, 132, 153, 192, 224, 232, 263, 267, 271: a, t, c, g, or other
ggcntcggtgaacaccttcagatctggtgctgttgagcagctgagaactcatgcaaggnggcttcagatacctatatttgagaagggttatgagatggatccggcagttgtagcgagggaggctattcaggnagcaacccggaacaaatcagntgttgttctggttgacactgctggacgtctgcaggacantgagccactcatgagggcatctccaagctatncaatctcnatagcccagacctggttttatttgttggagnagcntggntgg

SEQ ID NO: 5826 - DNA, 271 bp, Zea mays
  misc_feature: Incyte ID No: 700457804H1
ttaaaggaggctgagaaagagcatcagaaggagtcagaaaggatagagaaggaacttgctgaaatggaggaaatgaggaaaaagatcagtacaatgacagcagatgattactttgagaagtaccctgaactcaggaagaagtttgacgatgaaatccgtaacgataactggggatattgaagagattggagagaactcttatgatgccatttccatgtccgtgaagaaccaataattttcctgtgccctgaattgggtggtttccatagca

SEQ ID NO: 5827 - DNA, 274 bp, Zea mays
  misc_feature: Incyte ID No: 700457805H1
  unsure 43, 98, 105, 108, 147, 150, 157, 167, 206, 256, 259, 264: a, t, c, g, or other
ctggcccgtcgccgccgacgagaacaacaagcccgtgccgtancgacatggaaggcgtctggcacgccatggaggagtgccaccgcatcggccttgcnaggtccntcngcgtcagcaacttctctgcggccaagatgtcccggctgntcnccttcgncgccgtaccnccggctgtgaaccaggtggaggtgaacgtcggctggcgncaagagaaggtcagggaggcctgcgccaagaacggcgtcgtcgtcaccgnctnctcgncgctgggcgc

SEQ ID NO: 5828 - DNA, 275 bp, Zea mays
  misc_feature: Incyte ID No: 700457807H1
  unsure 267, 274: a, t, c, g, or other
gtaacgcagaagaggcaaacgggcagcgagctagatctcgcgtccccgctgcgactgtgaagccaccgtacgtacagatacggacaaggcgccggagcctcagcaatccctgagcagactagaggagtagctaaggcaaagggaggtggcaaagatgctgccgacgaccgcgtccaaggggcgcggggcctcccgctaccgccccgccgctcttcggtccctacctccgccgcatcgtcaagtggcaacaaatggatattgaatacncttttgnc

SEQ ID NO: 5829 - DNA, 272 bp, Zea mays
  misc_feature: Incyte ID No: 700457808H1
  unsure 224: a, t, c, g, or other
ccagagtggtgtggcctgtgaattctgcgaaaataaggtggtggccatactgctggttctgcagctcatggcagctccaccgacggccatggccgcccgctcgccgcgcggagccgtgccggatggctccctcgccacgacgcccaaggtgacgatgctgtcggccacgctgtgctacacgggggagacatgcaaatacattggctgcctcactcctgcttgcncctgcaactatagtgatcgtctatgctacatcatatttactcctgttg

SEQ ID NO: 5830 - DNA, 273 bp, Zea mays
  misc_feature: Incyte ID No: 700457813H1
  unsure 10, 44, 196: a, t, c, g, or other
ctcaattgangacggtgtttggggaggacaagctcaagtttgcnatgttgtcacagaagatatctcagcatctgtctgccccaccacccatcaatttggagcacaagattaagctgtcagggaacggagcacatagcagtgcttgctatgatgtgctcgtggatgttcctttcccgctgcagaaagagatgatggngttccttgccaacacagagaagcacaaggacattgaggcttgcgacgaggtgatatctgcttcgatcaagaagatcc

SEQ ID NO: 5831 - DNA, 275 bp, Zea mays
  misc_feature: Incyte ID No: 700457814H1
  unsure 66, 81, 132, 138, 165, 226, 256, 262: a, t, c, g, or other
cttctttcccgttcggctcacagcgaagaaggaagccggttagggtttccacctcctttcccctcntctaccttcagcgangaccgcgggccacaccctcgatatccttcccctcggacccggaggcgagcngcagcntccagcgcctgtcacgcctgcccgtcncgttattgggaggattcgccatgtctgacatggagtccgtcgcagctcttatgaactcganaagctccaagatacagcagcttcaggaggnatttgntgagcttgagagc

SEQ ID NO: 5832 - DNA, 276 bp, Zea mays
  misc_feature: Incyte ID No: 700457815H1
  unsure 7-8, 13, 26, 29, 35, 40, 42, 46, 74, 116, 134, 136, 216, 235, 269: a, t, c, g, or other
ctgatgnnttggntgagacaggcgangcnggaganaagtncngggnagacaacactgataaatttgggattgtnactgacgaagactctcaaactgacaaagatgtcgcagaaaanataagcaatatgattgangngtggttaaagactagaccgccacccccaccttcaccagttcaaccatctgctgatagctctggcgtagataaggcaaaanatgattctgatgataagantgctgctgatgctgataaaagggcagctaatgancatgagt

SEQ ID NO: 5833 - DNA, 272 bp, Zea mays
  misc_feature: Incyte ID No: 700457819H1
  unsure 36: a, t, c, g, or other
ctccaactctccgatctccaggaatccgcggctgangcgccggcgatggcggctacccatggtcgacgccgaatacctgcgccaggtcgacagggcgcgccgccacctccgcgccctcatctccaacaagggatgcgccccgatcatgctccgcctcgcatggcatgatgctggaacttatgacctgaagacaaaaactggtggtgcaaatggttcgattagatatgaagaagagtacactcatggttcaaatgctggtttaaagattgcta

SEQ ID NO: 5834 - DNA, 268 bp, Zea mays
  misc_feature: Incyte ID No: 700457821H1
  unsure 2, 10, 63, 123, 185, 188, 266: a, t, c, g, or other
cnacaaactnctccgctttcagcacctgcccagcggaggaagagtgcggattgcggcggcgcngcggacgaaacaatggcgtcggcgagggacgagcatcttgatgggattcgcgcgctgatngcggcccactcgccgccgctccacgggctggtcgtcccctccgaggatgcccaccagagcgngtncgtgtcggagcaggataaacggcgggagttcatctccgggttcacagggagcgctggcttggctcttatcaccatganag

SEQ ID NO: 5835 - DNA, 272 bp, Zea mays
  misc_feature: Incyte ID No: 700457822H1
  unsure 44, 175: a, t, c, g, or other
ctccttccctccctctacccgtcgccgctgctgccatggacgcngtcgtacagccagattttggagaagcaagtgctgtctgccgcgaaggcggtggaggacaagctcgatgaggagatcgccgcgctcgatcgcctcgatccggacgacatcgaggcgctccgcgagcgccggnatccagcagatgcgccgcgccgccgagcgccgcgccaagtggcgtgcgctggggcacggggagtacaccgaggtccccgagaaggagttcttctcca

SEQ ID NO: 5836 - DNA, 271 bp, Zea mays
  misc_feature: Incyte ID No: 700457824H1
  unsure 3, 127: a, t, c, g, or other
ganccgagaccaccaccgctctgcctcgcctcgcctcacctcacctcacctacgccgactagggttttgtaccgccgtggatctcgccgtccccgccatggacgtctcgcacgcgggatcctccgtncgccggcgaggctccgacgaccggggagcaccggatggggactaccatcgtcggggtctgctacgagggcggcgtcgtcctgggcgccgattccaggaccagcactggaatgtatgtagccaaccgtgcttcagacaagattat

SEQ ID NO: 5837 - DNA, 248 bp, Zea mays
  misc_feature: Incyte ID No: 700457829H1
caggccaaggccggatcggcggcctctcagatctcgccggccgccgtgagacagagaccgaaggggggttgaccggtgctcgggaggaagatgtttagcgggacgcagcagaagtgcaaggtgtgcaccaagacggtgtacccgatggaccagctctccaccgacggcgtcgtcttccaccgctcctgcttcaagtgccagcatgcaatctaccctctcatgagcaatattcctcgttcgaaggagtg

SEQ ID NO: 5838 - DNA, 272 bp, Zea mays
  misc_feature: Incyte ID No: 700457830H1
  unsure 9, 34, 52, 245, 249, 252, 261, 263, 267: a, t, c, g, or other
ggcgtggcnaacgttgcgcgacgggttgggtganctggacatcctgcgacgnctgcactcgcgctttggcccgctgctgtcggtccgcttgggttcatcggagcaggtgaacgtggcggaccgccgtctcgcacacgccttgctcgtggagcgtggcgccgctgtggctgaccgctcgccgctgctggtgtccaccgagaggttcggggccttcggctctttcagcatacacgtgtccagctcanggcncangttggagtntnctcngccgt

SEQ ID NO: 5839 - DNA, 275 bp, Zea mays
  misc_feature: Incyte ID No: 700457831H1
  unsure 10, 22, 24, 26-29, 67, 214, 225, 258: a, t, c, g, or other
gtagcaagtngcagcatactgntncnnnncgaatcgattaacgggcggcactcacccaccgtgtggncctgccaaactgtaccccccggccaacggcaggggcaccgtcaagcagtactacctcggcgggaagagccccgaggagtgcgcccccaacaggggcctcctcaagctcgtcaggaacaggtccgccgtcgcctcgcgctccggccgnctctacctcgncttccagctcagcaccgatacccgcagccgtantgatctacgccgtcggg

SEQ ID NO: 5840 - DNA, 281 bp, Zea mays
  misc_feature: Incyte ID No: 700457833H1
  unsure 4, 12, 15, 17-18, 26, 30, 34, 41, 58, 145-146, 157, 166, 172, 174, 177,192, 203, 220, 226, 236, 251, 254, 257, 275, 279-280: a, t, c, g, or other
cccngaaaacanggngnngagtctancganaacnacttctncggagaagaacacccantcgcccaccagatacacttgttaaactttgttgaggggtgatggcggtttctttcgcaaacctcaactccgaggcagggcttaacanncttgatgagtnccttctcantcgaangnaanatcactggctaccangcttccaaggntgacttggctgtctacncttcgntttcggctgntccctcgtccaagtntanccncgtagcaaggtggtttancacnnt

SEQ ID NO: 5841 - DNA, 269 bp, Zea mays
  misc_feature: Incyte ID No: 700457836H1
  unsure 41, 240: a, t, c, g, or other
gggatagtttgttcatccattaatcgtgaaacaaatgaganagtagcaataaagaagatacacaacgttttacgacaaccgtgtggatgcactacggaccttgcgggagctgaaactccttcgccatctccggcatgagaatgtcattgctttgaaggatataatgatgccaatacacaggagaagctttaaggatgtgtacttggtatacgaactcatggatactgatttgcaccaganaatcaaatcacctcagggcctttccaatg

SEQ ID NO: 5842 - DNA, 61 bp, Zea mays
  misc_feature: Incyte ID No: 700457838H1
  unsure 14, 33, 36, 48: a, t, c, g, or other
agaatgcgtgtcgncggcgggcgggacgacgangangaggtgtcccgnaagctcaagagca

SEQ ID NO: 5843 - DNA, 270 bp, Zea mays
  misc_feature: Incyte ID No: 700457839H1
  unsure 79: a, t, c, g, or other
cgccgctgggatctagcacgcgagcgagcgagagagccgcgcacctatctggcaagcgacgccgcggcctacgatcggngtcggaggcgaacacccccatggcggcggctggcggcggcgcaggagggaaggtatccttcaagatcatcctcacctccgaccccaagctccctttcaaagtgttcagcgtgcccgaggcggcgcccttcaccgcggtgctcaagtacgccgcggaggagttcaagtcccgaccccagaccagtgccatca

SEQ ID NO: 5844 - DNA, 268 bp, Zea mays
  misc_feature: Incyte ID No: 700457840H1
  unsure 95, 133: a, t, c, g, or other
cgatgtccaagtcgggagcgctggatcttgcttctggcctcggagggaagatcaacaaggtggaagtcaagtacggccgtcgatgagtatgaganatatcatggatactatggagggaaggaggaagcaaggnagtccaactatactgatatggttaataaatactatgatcttgccactagcttctatgagtatggttggggtgaatccttccactttgctcacagatggaatggagaatccttacgtgaaagcatcaagcgacatg

SEQ ID NO: 5845 - DNA, 268 bp, Zea mays
  misc_feature: Incyte ID No: 700457842H1
ctgcacgccatcgtcgacacctgccacagcggcaccatactcgacctcccctacctctgccgcctgtccaggtacgtacgtacgtacggagcatccatcgcgccacaccacagttaatccgcccaaaccaaagcggcaagggcaatcttcttgacgtcctcgtacgtgtgtcttctcttctctccatcaaggaccgggtactggcagtgggagaaccaacagacggcccgcctcgccgcgtccggcgagaccaagtgcaccagcggcg

SEQ ID NO: 5846 - DNA, 267 bp, Zea mays
  misc_feature: Incyte ID No: 700457843H1
  unsure 32, 174, 197, 205-206, 209, 218-219, 245, 253, 255, 259, 262, 266: a, t, c, g, or other
cgcttggcgtccgcctcagcccgccgccaggngagttcaggagagtttcgagaagctgaaatggctcctaaagctgctcctgccaagaagggtgatgccaagacccaggccttgaaggttgccaaggctgtgaagtctgggtcagtaaagaagaccaagaagatccgcacgtcngtgacatttcaccgccccaaganccttaagnnggntagggaccnnaagtacccaagaatcagcactatggnaggaacangnttgntcntacnt

SEQ ID NO: 5847 - DNA, 204 bp, Zea mays
  misc_feature: Incyte ID No: 700457846H1
  unsure 6, 8, 37: a, t, c, g, or other
ggcatncngtcagaccttccagagctgccccattgcnagaagagcaaagatcaacaccaggtccaggggcagcagcagtagcgtggcgaaggggtcaccaccaccagccttccagttccagtgcagggcgtcgatttcgcggcggacaccagcctccggctcgagctggacgagaaccccgaggcgatcatctcgggggcgtgg

SEQ ID NO: 5848 - DNA, 272 bp, Zea mays
  misc_feature: Incyte ID No: 700457848H1
  unsure 180, 196, 203, 248: a, t, c, g, or other
gcctcactattgactgtcggattccccactcgccggcgacaaccgccgcgcccgatccgtctgctaggtcttgcacctccgggctctgggcatggctgccgaagctggcccaatctccaaggtcctcatcgtcgtagcgatgcagacggaggcgatgccgctcgtccacaagttcaagcntcgtcgaggcgcccgnccacgantccacatttcctaaaggtgccccatgggttaggtaccatggcaantacaaaggcctccacttgacttgt

SEQ ID NO: 5849 - DNA, 186 bp, Zea mays
  misc_feature: Incyte ID No: 700457849H1
  unsure 18, 92-121, 160, 166, 173, 178: a, t, c, g, or other
ccgtccagtgtgtccgcnactccgctccccctcagtcctcagttcctacacctagcggtagcgtgcgcgcgggagacgtagatggcggcttnnnnnnnnnnnnnnnnnnnnnnnnnnnnnntgacgccgacagaggggacggtgatcgcgatccacagcntggagnattggancttcnaattcgag

SEQ ID NO: 5850 - DNA, 267 bp, Zea mays
  misc_feature: Incyte ID No: 700457850H1
  unsure 2, 15, 21, 28, 33, 52, 63, 66, 86, 131, 178, 202-204, 210, 213, 216,218, 222, 226, 230, 244, 247: a, t, c, g, or other
gnagtcatcagaganagcctnctcatcngcagncatattgtcgtattgtctntctcgtaatanatntgtcgatgttgagcccttangctgttgttggtacattggtacttcgtcgatgcttgaattgggancctttgtccgttttcctagactctgatgctgtatgcaactgaaacangtaaatctatgatcttaaggctgnnnaagaanggnagntnaagntaanaagnggggcccgcggaancgnccttgtaatactcgaggata

SEQ ID NO: 5851 - DNA, 264 bp, Zea mays
  misc_feature: Incyte ID No: 700457851H1
  unsure 27-29, 31, 68, 74, 76-77, 84, 87, 95, 97, 106, 108, 115, 117, 156, 164,198, 211, 250: a, t, c, g, or other
gcctacaagaacgtcatcggcgcccgnnncntccgtggcggatcatctcctccatcgagcagaaggangagagnannggaaaangangcgcacgngnctaccatcngngcctaangntccaagatcgagaccgagctcgcccgcatctgcgatggnatcctcgncctgctcgactcccacctcgtcccatccgccggngggccgagtccanggtcttctacctcaagatgaagggtgataccacaggtanttgctgagttcagt

SEQ ID NO: 5852 - DNA, 257 bp, Zea mays
  misc_feature: Incyte ID No: 700457852H1
  unsure 28, 177: a, t, c, g, or other
cagctatcgggtttgagggctatgagangcgccttgagatcacattctctgaggcacctgtactttgtggacccccatggcagcggtttgcgtgccctctccaggtcccagattgactctgttctggatcttgcacggtgcacgatcgtgtccgagctctccaacaaggattttgantcctatgttctctccgagtcaagcttgttcatctatcctctgaagattgtcatcaagacctgtggcataccaagctcctg

SEQ ID NO: 5853 - DNA, 268 bp, Zea mays
  misc_feature: Incyte ID No: 700457854H1
  unsure 2, 9, 81, 90, 125-158, 217, 250, 261, 265: a, t, c, g, or other
cngctaggngcaggccgtgtatacgccatccaccacggcaacatgtgctccggctcctggtccctggagcagcagcaagangcgcaaggnaccgtctcttgttgtcgtcaacctcaagcggcgcnnnnnnnnnnnnnnnnnnnnnnnnnnnnnnnnnngttcctcagttgctatcaggaggaagaggctgagactgaggaggttgcgagccggagcnaggcccatggagatggtgaactgaaccttaacntggaagaacgntgcnatt

SEQ ID NO: 5854 - DNA, 267 bp, Zea mays
  misc_feature: Incyte ID No: 700457855H1
  unsure 2: a, t, c, g, or other
anctcacctaccccaccccctcgattccttcccagctctggctacttcctacgccaccaccgcccgctccggcctcggctcctcgagcaagctgccatggctgccgccgcgctgagggagcaactcaacgctctcctctcctccatgttcgcctcgggtctggtggacgagcagttccagcagctgcagatgctgcaggaagacgggggcacgccgggcttcgtcgccgaggtcgtcaccctcttctgcgacgacgccgacaggatc

SEQ ID NO: 5855 - DNA, 268 bp, Zea mays
  misc_feature: Incyte ID No: 700457857H1
  unsure 2, 6, 36, 45, 50, 53, 56-57, 68, 112, 155, 199, 213, 216, 237, 250-251,255, 259-260, 266: a, t, c, g, or other
cncganacgctacgcctcgggtcaaaccctaagcanggagttgancatanganaanngaaaacgagtnagttgcagtctgagtctgtcaaggatgccatctcccagatagtnggggatgccacgagaagaataggaagttcactgagaatgtggnacttcagattggtctgaagaattatgatagcaagaaggacaagngtttcagtggctcngtnaagttgccccatatccctcgncccaagatgaaanntttngttnnaaaaanaa

SEQ ID NO: 5856 - DNA, 265 bp, Zea mays
  misc_feature: Incyte ID No: 700457859H1
  unsure 28, 99, 170, 196: a, t, c, g, or other
gcttaatagctcacagcagagcataganactttatcacattggtgtgtctttcatcatcgttactgccaacaagttgtagaaacatgggattgcgagtntcatgcagctcctggagagaggagggtatctttgctgtaccttgcaaatgatattatgcagaatagcaganaagaaggcaatggatatataactganttcatgagggtcatccctgctgccttgaatgaagtgttgactatcagagatgattttgggcggaatgtt

SEQ ID NO: 5857 - DNA, 268 bp, Zea mays
  misc_feature: Incyte ID No: 700457860H1
  unsure 65, 202, 216: a, t, c, g, or other
ctccaactccaatccatggcctccacggatcgctccacgccagcggaggacgagcaacagcagangcgcccgtactctcttctcgccgtaccagatgccccgcttccgcctcgcccaccgggtggtgctggcgccgatgaccaggtgcagggcgcccgacgcggtcccaggccccgcgctcgcggagtactacgcgcaggtnccacggagggcggnttgctcatctccgagggcaccatcatctcgccgtccggccctgggttccctt

SEQ ID NO: 5858 - DNA, 220 bp, Zea mays
  misc_feature: Incyte ID No: 700457863H1
  unsure 163, 208: a, t, c, g, or other
taaacattgcagcaataaaggctgcggttgaaggtgcggacaaattgaatgctgttcagttggagtttgccaaagatcgtattatcatgggaaccgagaggagatcaatgttcatatctgatgaatcgagaaagcttactgcctaccatgaaagtggacatgncattgttgcactcaacacccagggtgctcaccccatacacaaggnaactatccttct

SEQ ID NO: 5859 - DNA, 275 bp, Zea mays
  misc_feature: Incyte ID No: 700457865H1
  unsure 15-16, 24, 38, 47, 138, 153, 155, 168, 172, 175, 177, 251, 267: a, t, c, g, or other
cccgccgacgctgcnntgtccatngccaccgcaggatnactgagatngggggttttgtcaagacccacaagagcaatgcataacttcaagagtttccaggtgaacgttcaagagaaggcgcgctggccagacagaatncagggccaggataangntgattaaccacgnacanaancnagtacaatacacccaaataacagatttgttgtgcgatttaccaacaaggccatcacagcacaaatcatatctgntagtatagcaggtganatggttct

SEQ ID NO: 5860 - DNA, 255 bp, Zea mays
  misc_feature: Incyte ID No: 700457866H1
  unsure 5, 17-18, 35, 67, 110, 121, 128: a, t, c, g, or other
ctcgnctcgggtcaaannctaagcagggagttganttatccgctgcagccatgagtaagttgcagtnctgagtctgtcaaggatgccatctcccagattgttggggatgncaaggagaagnataggangttcactgagactgtggaacttcagattggtctgaagaattatgatccacagaaggacaagcgtttcagtggctctgttaagttgccccatatccctcgtcccaagatgaagtgtgcatgcttggtg

SEQ ID NO: 5861 - DNA, 264 bp, Zea mays
  misc_feature: Incyte ID No: 700457867H1
  unsure 29, 256: a, t, c, g, or other
gaccaactcgaagcttgcgttcttgtagnagaggtcggcagcaagcggtagagcgagaggtcgagacagatgaagagcagcactctgttggcgatcctagttctccaggcccttctggtctctacggccgtggccaaaggacctgcagggccgaagaagcagtgctggtgcggcgagtgcaccagctggtcgggcgtgtggacctgcgacgacctcctcaccaagtgcgccgccacctgcaagaatgcgtccccgnctccagga

SEQ ID NO: 5862 - DNA, 264 bp, Zea mays
  misc_feature: Incyte ID No: 700457868H1
  unsure 27, 83: a, t, c, g, or other
gtgtaaacacactgaagaaggattggnatcctggccttggattaagacatgttcttctggttgtgagatgccttctgattganccatttcctgaatctgcacttaatgaacaagctgggaagatgttacttgaaaattatgaggaatatgcacgacatgcaaggttatacactggcatccatgcccttaaacctaagaatacgtccaagaccggagctatatctgagtcaaccacagctctgaatgtcgacaagtcaagtactg

SEQ ID NO: 5863 - DNA, 261 bp, Zea mays
  misc_feature: Incyte ID No: 700457870H1
atagttaagggaaatgggactatatttctagcgggtccaccacttgtaaaggctgctacaggagaggagatatctgctgaggaccttggtggagcatcagtacattgcaaggtatcaggagtctcagatcattttgcacaagatgaaattcatggacttgagttggggcgaaacattgtgaagaacctgcacttagctgctaaaggaacaaatattcagagttctgcttgtggttaccaagagccattgtacgatgtagag

SEQ ID NO: 5864 - DNA, 262 bp, Zea mays
  misc_feature: Incyte ID No: 700457871H1
acacctgccaagattctccaaacgggtagatattagccaattcagcttccctttaaatgttctaccaaaccttcctcaagtgctcttactatcgagtaagaaggacacaccagcaatgtggcgtgctatcagtgggatgttccgcaatcggataatcttttatgatgctgaggttcacgatgtttctcatcctctgctgaaaagtcttggcgtgaagaatctcccagcgtaattgggcggaaccgtgaatggtgaggagctc

SEQ ID NO: 5865 - DNA, 265 bp, Zea mays
  misc_feature: Incyte ID No: 700457872H1
  unsure 2: a, t, c, g, or other
cnccccctctccggcgtgccgacggtatccatggcggcggtggtgcgcggcgtcttgaggggcatcaaggagaagggactcaccaacttcatccgcgacgtccgcgacgaaggatacttcaaatgccttctggacgggaaccttttgcaaacgaaaatccacaatattggcgcaacacttgtaggagttgacaagtttggtaacaaatattatgagaaactacatgacactcagtatggaaggcataggtgggtagaatatgcag

SEQ ID NO: 5866 - DNA, 279 bp, Zea mays
  misc_feature: Incyte ID No: 700457874H1
  unsure 35, 112, 159, 220: a, t, c, g, or other
cgccgccagacactccgtagtctgtaccccaagcnccggcgcggcggcggcggctaccatggcagttcgggaagaacaagaggatctccaagggaaagaagggtggtaaganaaagaccgtacgatacccttactactaagaaggactggtatgacatncaaggccccatacggtacttcagtgtgcgacaacattgggaagactactcgtgttccaggnacacagggtaccaggattggcctctggatggttctgaagcacagagttctttgaggttt

SEQ ID NO: 5867 - DNA, 170 bp, Zea mays
  misc_feature: Incyte ID No: 700457876H1
  unsure 13, 32, 61, 67, 80-82, 89, 118, 124, 145-148, 158, 160, 163-164, 169: a, t, c, g, or other
gtacatctagganagtactatacaccctacgnggtggaagtactgctgacagccatcgaanaacgtncaaggccaagatnnnaggacanttgagggcattccctccagatccagtcancggacntcatttttgaccgggcaagcnnnnctccgagtgnanggnntcgana

SEQ ID NO: 5868 - DNA, 265 bp, Zea mays
  misc_feature: Incyte ID No: 700457879H1
cgacactagttttgtttggtggtgaagatgcaaaacggtgtctcttgaatgacttgcacatccttgatcttgaaaccatgacatgggatgatgtggatgcaataggcaaccctccttctccaaggtcagatcatgctgctgcttgccatgctgaccgctatcttttaatttttggtggggggtctcatgcaacatgtttcaatgacctacatgtcctgatttgcagacgatggaatggtcaagacccaaacaacaaggcctgact

SEQ ID NO: 5869 - DNA, 265 bp, Zea mays
  misc_feature: Incyte ID No: 700457880H1
  unsure 11, 41, 106: a, t, c, g, or other
catcgcatggnggatcttcagccaactgaagcttgtttganactgaatgtttcgcctttaaatttaagatttggcgacatgttcctttcattgcatggaggacctncagtaccctgttactcgtcagtattggacttctattagcatgtataagcaacataggactgcgaatacaagcaaaatatatcatgtagttgaagaacctatggtctttttctacctttaggcaatccaaccctaagctttttatgttgctgtcgctgca

SEQ ID NO: 5870 - DNA, 263 bp, Zea mays
  misc_feature: Incyte ID No: 700457882H1
  unsure 3, 174, 186, 195, 206, 219, 262: a, t, c, g, or other
ggntttgtacaatggcacatcaaagaagctctctctgtcccgcaatgtacctctgctccaagtgcaatggtaagggttccaagtctggagcttcgtcgaggtgtgctggttgtcaaggttctggcttcaaggtccaaatccggcagttgggacctggaatgattcagcaaatgncagcatccttgncagcagtgnaagggttctgnagagaccatcagngataaggatagatgcccacaatgcaaaggtgataaagttgtgnc

SEQ ID NO: 5871 - DNA, 264 bp, Zea mays
  misc_feature: Incyte ID No: 700457886H1
cgctctttctgtgtttgtgccttatgctggtgataaaactagtagcctcatgctgatggctcaacatgatgtacgttttaacaacctatggtgtcctctcagctgcatgcaaaacggaatgcaacagcatttttcacaggatggattggtataggattgtgccttgatgaagctacacacaatcaaatctcctaaaactaaaagtgcccaagcagcttatcgattaaagtcggaatgcagatggtgccttacaggcacaccatt

SEQ ID NO: 5872 - DNA, 264 bp, Zea mays
  misc_feature: Incyte ID No: 700457887H1
  unsure 4, 34: a, t, c, g, or other
cganagcatagtcgatcatgaagggtggcaaganggaagtggccggtgcggtggtggccatactgctggttctgcagctcatggcagctccaccgacggccatggccgcccgctcgccgcgcggagccgtgccggatggctccctcgccacgacgcccaaggtgacgatgctgtcggccacgctgtgctgcacgggggagacatgcaaatacattggctgcctcactcctgcttgctcctgcaactatagtgatcgtctatgct

SEQ ID NO: 5873 - DNA, 262 bp, Zea mays
  misc_feature: Incyte ID No: 700457888H1
  unsure 50, 117: a, t, c, g, or other
cctttcacagtttccctcccccaaaactactttcccacaaacccagaccngagcagcttgcgtctatcgtttcttttcttgttggccttctccttgccttgcttttgcttgctcgtngcttcttgagctcgagcccgccccttctgcgccttgcccaagtctctgtgtgttttttataggcttgagagcttggaatagcggggggtggaggaagcggaagaggagcttcgttttgtgttctagagggagtcatgttccatgg

SEQ ID NO: 5874 - DNA, 259 bp, Zea mays
  misc_feature: Incyte ID No: 700457890H1
  unsure 13, 34: a, t, c, g, or other
gagagtgaccctnccgggcgggagagagccaggnagaggagggcgacgatggcgtccggctggggcatcaacgggaacaagggccgctgctacgacttctggctggagttcagcgagtgcatgagccgctgccgccagccctccgactgcggcctcctccgcgaggactacctcgagtgcctccaccactccaaggaggtgacctatctacccccgcctgtccctcggcttcctccgtttcattcgattcgtcgcctcc

SEQ ID NO: 5875 - DNA, 264 bp, Zea mays
  misc_feature: Incyte ID No: 700457891H1
  unsure 22, 24, 31, 36, 69, 104, 186, 245: a, t, c, g, or other
ccaccatggcgaagtttcagantntgcatgnttcangacagctcatggctgctgctaaccttgccaatnaccagagcaacaccaaactaatggggaccaaagangaagcaagtgcttctgcgaccaaccagactcctggtgtcggagccatcggcaataatgctcttcagcatgccacacctctancacagctaccagaatatgctcagaagctccagtgcaaatccagtcttgctgcagcaggnggcatcgagtgtcttcaaa

SEQ ID NO: 5876 - DNA, 260 bp, Zea mays
  misc_feature: Incyte ID No: 700457892H1
  unsure 44, 58, 250: a, t, c, g, or other
catttcattagcaatcggtggccacagagagttaactaaaaatnattcagcgacaganatcttcgactcctacgttcgtggttccccatcgtcatcgccatggatttctcttaggctcacccgtccgctcggctcgcttccttccccactctctctgatcccgtcgcacttccctcctcgctgcagcccctctactattgcgattaccgtttcctcgctgccctttcctttttcggtcggcagcaatcanggggcaagcg

SEQ ID NO: 5877 - DNA, 271 bp, Zea mays
  misc_feature: Incyte ID No: 700457902H1
  unsure 49, 115, 149, 181, 229, 241: a, t, c, g, or other
gacgacgatgcgctcgccggacggcaagaagctggacatgctagcggangaggacctcggcagcatgccctaacctcaaggcgaccatcaaggagacgctgcgcctgcacccgcnggcgccgttcctcctcccgcactactccaccgcngactccgagatcgacggctacttcgtcccagncgggagcgcgtctcgtcaacgcctgggcgctcgggaggaccgcacgangtgggagaagcnggagagttcatgccggagcggttcgtgcag

SEQ ID NO: 5878 - DNA, 271 bp, Zea mays
  misc_feature: Incyte ID No: 700457903H1
aacaatttttggactcctgctctagtgagagccaaaagatagatctatgtttccgtggtgctcccgttgaagatttatatttggacttcactcttccgggctatcctgaatatgttctcaaggaaggtggagagaatgcagaggtcaacatttgtaacttagaagagtatatttctttggttgtggatgctactgttaagaccggcataatgcggcaagtagaggcatttaaggcaggattcaatcaggtgtttgacatatcatcactgca

SEQ ID NO: 5879 - DNA, 272 bp, Zea mays
  misc_feature: Incyte ID No: 700457904H1
  unsure 46, 73, 133, 221: a, t, c, g, or other
ggactacgtgcggcggttgcaccggcacgagccccgcgaacaccantgctcctccgccgtcgccaagcacatncaaggcgcccgtccacctcgtctggtctctagtgaggcggtttgatcaaccacagctttncaagccctttgtgagccggtgtgaaatgaagggcaacattgagattggcagtgtcagggaggttaatgtaaagtctgggctgccagcnacaagaagcacggagaggctggaactgttagatgacaatgagcacatactc

SEQ ID NO: 5880 - DNA, 275 bp, Zea mays
  misc_feature: Incyte ID No: 700457905H1
  unsure 7, 15: a, t, c, g, or other
gccgagngccgaggnaaggcaatatcgatgcgtacagcatctacacgccgacttgcaagaagacttcactccacaagcgcaggctaatcagaggaagaacgccctggttgcccagagggtacgatccctgcacggagaagtactccacgaagtactacaacctacctgaggtgcagagagctctacacgccaatgtcaccggaataccgtatccctgggtaacctgcagtgacccagtgtatgatttttggaaagattcaccgaggtccatgctt

SEQ ID NO: 5881 - DNA, 269 bp, Zea mays
  misc_feature: Incyte ID No: 700457907H1
gttctcctgtcaatctgctcactgctcacggacccaaaccctgatgatcctcttgtccctgagattgctcacatgtacaagaccgacagggccaagtatgagtccaccgcacgctcctggacacagaagtatgccatgggctagaagcaaggctaaaagctggccaaactggtgaatgtgccggaccccaaatcgttatcacctaaataaccagtcagtcacaagtatgaatggacttttgaggaccattgtgccctgttgaatcatgt

SEQ ID NO: 5882 - DNA, 271 bp, Zea mays
  misc_feature: Incyte ID No: 700457909H1
  unsure 32, 54-75, 118: a, t, c, g, or other
cgctgcgtaaacgaatccatcgccatggcgtnctcgtctcgttgcggcggcggnnnnnnnnnnnnnnnnnnnnnnagcgtcccccctcgctcgcctaatctctcgccgcggccttgcngtgccgcagacggccatgggtctgcgaaggtgcccttgtggaaagatccgttgagcccgagcaagtggaaggaagagcactttgttctagcaagcctctcaatgtggggggttattttttatggtggttacaagctttttagtggaaagaagg

SEQ ID NO: 5883 - DNA, 270 bp, Zea mays
  misc_feature: Incyte ID No: 700457911H1
catgctaaacctctagttatctcgcataatggtgcgagtggtgactacccagactgcactgaccaagcttatgaaaaggcagttgccgatggtgcggatgtcattgactgtcctgttcaagtgactaaagatggcatactgatatgcatgagctctgttgacctaatggatgttactactgttgcaaaatcacaatttgcttcgcaagtaactaccatcaacagtctgaaggctgggtctggagtcttcaccttcaaccttacttgggat

SEQ ID NO: 5884 - DNA, 196 bp, Zea mays
  misc_feature: Incyte ID No: 700457912H1
  unsure 49: a, t, c, g, or other
taaagagtaaatgagcatggtggatggtttatactagtcatcagcgganttgttggtaggcacttgctggagtagttgcttcgaacttctttttttcgtgttagatgaggtaaaaaaacaattttgtgttattgactctgctgtgagcgagtgaaccttgcacattttcgttatctcaaatggatagatctgttct

SEQ ID NO: 5885 - DNA, 120 bp, Zea mays
  misc_feature: Incyte ID No: 700457915H1
atactacaataacttatgcataaatatgtgttatagtgtaatgagaaacgattttgtaatctatttctagttgagttgtcgttgcattgctacggtttctatatatcacagttatgttgc

SEQ ID NO: 5886 - DNA, 272 bp, Zea mays
  misc_feature: Incyte ID No: 700457917H1
  unsure 135, 148, 178, 211, 242, 256, 268: a, t, c, g, or other
gcatgatcagcgccgtgcccgggatgaaggcgctcgatcatgaacgccgccgaggacgagatcgtgcgcctcacgcgcgaggtcgtgcccggcatgatcgtcaccgggatggaggtcgcagagatcgacggcgcnccgaggatgggcncgacgttcggcgccatgatgatctccggcnagaaggcggcgcacctggcgctgaaggcactgngcaggccaacgccgtggacgggaccatcccngaggtgtcgccggngctgcgcgaggngttc

SEQ ID NO: 5887 - DNA, 269 bp, Zea mays
  misc_feature: Incyte ID No: 700457918H1
  unsure 258: a, t, c, g, or other
cctgaacctgaagctattgatatgcacaatgatgctggaaatggtcagacaccacaacagttgcggttgccacggacaaaggatgttatcgtaaatgggaccattgtgaaagtcaagtactgtgacacctgcatgctgtacagaccacctcgatgctcacactgttctatctgtaataactgtgtggagcactttgatcaccactgcccttgggttggcagtgcataggattgcgcaattatcggttctctatatgtntgtattctcta

SEQ ID NO: 5888 - DNA, 268 bp, Zea mays
  misc_feature: Incyte ID No: 700457920H1
  unsure 18, 47: a, t, c, g, or other
attatggacatgcggcantcccaaatgaccggactttgaatgatggngacatggcactaatggatatgggagctgaataccatttctatggatctgatatcacatgctcataccctataaatgggaaattcaacagaagtcagacaataatatacaatgctgtgcttaaggctcataatgctgttatatcagacatgcggcctggagttaattggatggatatgcacaaattagcagaacgggcaatacttgaatctctcaggaagga

SEQ ID NO: 5889 - DNA, 267 bp, Zea mays
  misc_feature: Incyte ID No: 700457923H1
agaggctcggcgattacctgatcgaacagggcttctaagtttgtcataatgctattttggtcattgggcacttaagtttgcacctcatttggttctgtaatatgtgggcttgtgcatgtgcttggcgtattgcatgcagtgaataatttatcttcgcgttgggttggtgacaatgttgggaacggatttgaattggggtttatgcttgccatctcctcatatctcgaactcagctgctgtttcactgagtaatgtacatttccctgg

SEQ ID NO: 5890 - DNA, 273 bp, Zea mays
  misc_feature: Incyte ID No: 700457924H1
  unsure 23, 29-31, 39, 46, 55-56, 58-59, 72, 89, 105, 113, 126, 141, 154, 172,189, 194, 203, 208, 212, 223, 225, 230, 239, 252, 258, 266-267, 269: a, t, c, g, or other
atctggcggcactttctgagttnctcccnnnaccagctncaccagngcagaaganncnnagcaaagctgatnctgcaagtcaacacagncattagtggtgcaggngtctgctnatcttaaggctgnactggacaacccgcngttccagcttganccattcgctgcgatccancagcacctgctggcaangcagncgcctgcanctgcnaagnaggacgacgcngnggggnagcaggggnaggtttccaaggncaaganaagcaggnngntgtt

SEQ ID NO: 5891 - DNA, 270 bp, Zea mays
  misc_feature: Incyte ID No: 700457925H1
  unsure 4, 41-42, 52, 74-75, 105, 125, 141-142, 196, 253, 257, 262-263: a, t, c, g, or other
ctcnagcgatgtcggctcaatcccatcccactaccacccannctcgtcgtcngccgattcgatccagttcttcnnacccaggggctgtgatggcgacgaagaggngcgtgggcaccctcggcgangcggatctgaaggggnngaaggtgttcgtgcgcgccgacctcaacgtccctctcgacgacgcccagaagancaccgacgacacccgcatccgcgcctccgtccccaccatcaagttcctcctcgagangggngccanngtcatcc

SEQ ID NO: 5892 - DNA, 68 bp, Zea mays
  misc_feature: Incyte ID No: 700457926H1
  unsure 23, 27, 32, 35, 39, 41, 44, 59: a, t, c, g, or other
gatgaatttgaaggtgagaaagnagangaggncgncgangnggncgatgatcatcctcnatggtgatg

SEQ ID NO: 5893 - DNA, 269 bp, Zea mays
  misc_feature: Incyte ID No: 700457927H1
  unsure 12, 204: a, t, c, g, or other
ggcgcgaccgancaaccgtcgctgcgctacgccaggtgccaaggtcttcttcgggtccttcgccggcgaccagcagcaccaggcatagacttgtgtaagaaatggatgcaactgccggttaattgcgacacagatttatatggacatagatattggggccatgtgtaagggcggaagctgttcctaccgctccaataaggggantcctgctggttctaccaggaagatccattccacagcctctcaaggtcggatggcatctgacacag

SEQ ID NO: 5894 - DNA, 270 bp, Zea mays
  misc_feature: Incyte ID No: 700457928H1
  unsure 183, 197, 200, 209, 253: a, t, c, g, or other
tggtgcgatgcaaagggcggaagacgcggaggagataggacaactcagcgcaccacacaaggcactgtcagcagcggcggccggagactcccacgccagtgccagactcgattgggaggggagagatgaaggccacgctcaagggtcgctacgagggcgacaaggccacggccgccaccagcntcgtccgcccccgncgncgacctccncctcaaggcctccgccaccgaggccgtcttcgtcaacgggcctnccctccggggcctcacc

SEQ ID NO: 5895 - DNA, 271 bp, Zea mays
  misc_feature: Incyte ID No: 700457929H1
  unsure 10, 23-24, 39, 86: a, t, c, g, or other
cgacggcganggcaacgactggnngcgacagtcgctgcngccctacttgccggttgcttcggatcttcttcggcccgttagccgtncgacgagcaccaccagggcaaccagatacttcagtggcttcgcaaggatgtcctggtgcactattgagtctgatcctggtgtgttcactgagctgattcagcaaatgcaagtgaaaggtgtacaggtggaagagctttactctctcgatgtgggctctcttagtcaactgcggccagtatatggg

SEQ ID NO: 5896 - DNA, 209 bp, Zea mays
  misc_feature: Incyte ID No: 700457930H1
  unsure 6, 21, 68, 71, 77, 79, 85, 108, 112, 121, 125, 131, 133, 139, 141,147-148, 157, 164, 171-172, 181, 188-189, 200: a, t, c, g, or other
ctcgcntcgggttcaaacccnaagcagggagttgatttagccgctgcagccatgagcaagttgcagtnctnagtccngncaaggntgccatctgcccagattgttggngatnccaaggagnagantaggangntcactnanactgtnnaacttcagnttggtcngaagaannatgatccanagaaggnnaagcgtttcantggctctgt

SEQ ID NO: 5897 - DNA, 267 bp, Zea mays
  misc_feature: Incyte ID No: 700457935H1
  unsure 75, 152, 197, 235, 240: a, t, c, g, or other
gctcctatctggtataggacggagctgagcttctagcaacgtacagtgtatccgccatgagtcctttcggggcgntgatcacgccagaaaccctcaagtacatgtccaagtaccagggacgtgagatcacgcaggtggactgcgcacgggangcgatgaggctgatccacgcggaagacaagaacctcaaggccgangactcagcgtgggagtgaagaagaagttcggcaacggngtgancaccatggtcctcgtctacaacgccac

SEQ ID NO: 5898 - DNA, 266 bp, Zea mays
  misc_feature: Incyte ID No: 700457937H1
  unsure 138, 176, 199, 265: a, t, c, g, or other
ggcatcaaccagattgttacaggcgacttgatctccttgtctgaacaagagcttgtcgactgtgacacttcgtacaatcaggggtgcaatggaggtctgatggactatgcatttgagttcatcatcaacaatggcggnatcgacaccgagaaggattacccttacaagggcacggncggacggtgtgatgtcaacaggnaaaacgcgaaggtgtcactattgacagctacgaagatgtaccagcgaacgatgagaagagtctgcng

SEQ ID NO: 5899 - DNA, 265 bp, Zea mays
  misc_feature: Incyte ID No: 700457939H1
  unsure 212, 247: a, t, c, g, or other
gcgctcatttctgcatccccctcccgccgcgccgcctcaccgccgccggagaagatgggtcgcgtgatccgcgcgcagtaagggtgcggggtccgtgttcaagtcccacacccaccaccgcaagggccccgcccgcttccgctccctcgacttcggcgagcgcaacgggtacctcaagggcgtcgtcaccgacgtcatccacgaccccggcngtggcgcgccgctcgccaaggtcatttccgccacncattcaggtacaagcacc

SEQ ID NO: 5900 - DNA, 257 bp, Zea mays
  misc_feature: Incyte ID No: 700457941H1
  unsure 107, 112, 140: a, t, c, g, or other
cttcctcctcttctttatgcaaggcattagatctcccttctcttctcttctctggagagctttttctggagcttgggcgtgaggatcctgcaggccggtggcgtggngcgcncgttccggcgcgccttgtcagccgaganagtcgagctggtgaagtccctccactctacaccaccggcgggcccatagcacggcagcctcagccccgcgcggtgagctaatctattgtcggcatggatgtagtcactccacttcag

SEQ ID NO: 5901 - DNA, 264 bp, Zea mays
  misc_feature: Incyte ID No: 700457942H1
  unsure 172, 191: a, t, c, g, or other
cctcgatctcgcgctaggttttcgccacaccgctctcgtcctccgcgaagatgccgaagaacaagggtaagggaggcaagaaccggaagcgtggaaagaacgaggctgacgacgacaagcgcgagtcgtcttcaaggaagacgggcaggagtatgcgcaggtgacccggatnctcggcaacgggcggtgcnaggccacctgcgtggacggcagcgtcgcctctgccatatccggggcaagatgcacaagaaggtgtggatcgcg

SEQ ID NO: 5902 - DNA, 266 bp, Zea mays
  misc_feature: Incyte ID No: 700457944H1
  unsure 73, 110, 160, 163: a, t, c, g, or other
aggaatttgatggtatatgggcaccctggtggtatgggagtgtgcacaagtcttcaggtttctctaagcctcnccaatatcctctgactttcccattcgtgttttatganctgcttgagcaaagcttgcctttctacaacatggctgaagcgccaaatanggnagataagaggaccgcagcaaccaccattatcggaccctcctctgcctgtccctgcaaataaaaacattcttgtttgggttggagatgaacttttgccccgtaa

SEQ ID NO: 5903 - DNA, 269 bp, Zea mays
  misc_feature: Incyte ID No: 700457946H1
cacatctaatcttgacaaaagtggttttttctacaatagcaccacccaaaaggccgatggtatatctagccatctttctgttggacaaattgcttatgatactggctatggaagtacacaggcaagggcaactcctaccggtctggcagacttaagtggagtccctggaggcgctggccttcgttctggatttgacccatcaagaggcaatgcatatgatggttctcatgttgccaatctcagctcttcaaaaactgggacccatgatg

SEQ ID NO: 5904 - DNA, 274 bp, Zea mays
  misc_feature: Incyte ID No: 700457948H1
  unsure 3, 198: a, t, c, g, or other
agnccacagccagttcagccacatcactagctatctgtgcagaggcaatgggcgtccaaggttgagctggtggtggaggtcaagtccccggctgacaagctgtgggcggcgctgcgtgactcgacggagctgttccccaagatcttccccgagcagtacaagagcatcgagaccgtcgagggcgacggcaagtcggcnggcaccgtccgcctcctcaagtacaccgaggcggtgccgatgctgacgttcgccaaggagaagcttgagacggcgg

SEQ ID NO: 5905 - DNA, 267 bp, Zea mays
  misc_feature: Incyte ID No: 700457949H1
gaagtttgaaactgataatggctacgaacttgttcctctgaacccaattgaggtggacgacgaggccgtggaactaaacaaggaacttgtttcaaatttgctagagcttgatgacgttgatgccgtctatacagaccaaaaatgagtgaattcatgagctacagctctcaattcaagacgcgctcggccaatggactttgttcgagtatattcacttttcattgatgggaaaaaaatgttaggtctttttatgaagcctggttgagc

SEQ ID NO: 5906 - DNA, 248 bp, Zea mays
  misc_feature: Incyte ID No: 700457952H1
  unsure 58-59, 82, 110, 193: a, t, c, g, or other
catttgatcaagggtagagatcaccaaagctgtgttagacacagttctcaaaatttgnnaagcctgcttttgaagacttcancctcccaacgaagaagtatgctgatgtnatcatcccacgcggaggagacaatgatgtggcaattgacctaatcgttcagcatattcggactagacttggacaacatgatcntcgtaaaatacaccctaatctgtatgtaattcagactacttatcagatacgaggc

SEQ ID NO: 5907 - DNA, 246 bp, Zea mays
  misc_feature: Incyte ID No: 700457953H1
  unsure 2, 23, 31, 38: a, t, c, g, or other
gncatagtcgatcatgaaggganggcaaganggaagtngccggtgcggtggtggcactactgctggttctgcagctcatagcagctccaccgacggccatggccgcccgctcgccgcgcggagccgtgccggatggctccctcgccacgacgcccaaggtgacgatgctgtcggccacgctgtgctacacgggggagacatgcaaatacattggctgcctcactcctgcttgctcctgcaactata

SEQ ID NO: 5908 - DNA, 268 bp, Zea mays
  misc_feature: Incyte ID No: 700457955H1
  unsure 13, 50, 69, 179: a, t, c, g, or other
cgactgcccaacnccgatccggcgatccgtctccttcttttcctcctttnctgccgtccccgatcactncgcaaccatggcggcggcagcaggcggaggcgcggtgcgtgctactgtcccagaaggagcaggacatacagatgatgctcgccgccgacgtccaccttggcaccaagaantgcgatttccagacggagcgctatgtctttaagcgcgttccgacggcatctacatcatcaatcttggcaagacatgggataaactccag

SEQ ID NO: 5909 - DNA, 265 bp, Zea mays
  misc_feature: Incyte ID No: 700457957H1
  unsure 190: a, t, c, g, or other
agacgaccttgatgcaccggctggtatgcgatacgcaagcatcaaataagaggggctacgtcgtaacctggaccctgcagtgatgaccctgccattcggtgccaacattgatattcgtgacactgtgcggtataaggatgtgatgaaggagtacagccttggtcccaatggcggcatcctcacctcgctnacacttatttgccaccaagttcgatgaggttgtatctgtcattgaaagacgtgcagaacaattggattatgtact

SEQ ID NO: 5910 - DNA, 265 bp, Zea mays
  misc_feature: Incyte ID No: 700457960H1
gcatctgcaagctccaccagtcacagccacacggcggaaaaacgaaccgaggaacaatccgggttctgcaggaacccactaccaactgtgcggcgcgtccaaaaatacaaaaggcaagcgagcgagctccaagttcggctgctccaatttcactcggcatggctcctcaggcgtgggtcgtggcggagaacggcgaggacctccaacaacccaggaattcctgccgctctctaagcttgaagatgttggcgtgttgtattggcat

SEQ ID NO: 5911 - DNA, 267 bp, Zea mays
  misc_feature: Incyte ID No: 700457961H1
  unsure 16, 87-108, 139, 191, 224: a, t, c, g, or other
tcctcctcctccctcnctcctttccatcccgtttcttcgccgcctccatctccaggccgcgtcgaattcttccatccaccgcaccgnnnnnnnnnnnnnnnnnnnnnnctgggcgcaacgaggaggcagcttggatccngtcccatgctgggacagattttgcgaaggctccgaccagcggtgtcggctgnggtggcgaggggctactccgctgcggcgaaggngatgactgtccgtgatgcattgaactctgcattggatgaagag

SEQ ID NO: 5912 - DNA, 270 bp, Zea mays
  misc_feature: Incyte ID No: 700457962H1
  unsure 119, 179: a, t, c, g, or other
aaagttgctgttgcagtgccgaatcttgatgagcttttagaaagcactccaacttcacgtatttgcatcagtgtggtatgaatggtcggcagacaaaatattaccatttgcactacagngaactagtacgccttgctgccctttacaaatatggtggaatataccttgactctgatgtnattattcttaaaccttgaacatcgctccggaattctattggtgccacaaatcatgtctctggaaattcccgttttggtggggctgtgttag

SEQ ID NO: 5913 - DNA, 271 bp, Zea mays
  misc_feature: Incyte ID No: 700457963H1
  unsure 19, 50, 53, 55, 197: a, t, c, g, or other
gcgatggtccaactcaatngcccattgcgcaatctggaagagctgttggnggnantaattgcaattggctccgagttaccaagggaaagaagccattcaagatcgacctcactccgttccaggagtgatctgctttggttgatagaaagcacaatgccaccatccatggaattccacagggtggatttcaatatganttgagtacttgctattgttggagcatacctgcagtggatgacttaggctatctctagcagatttttttatctca

SEQ ID NO: 5914 - DNA, 265 bp, Zea mays
  misc_feature: Incyte ID No: 700457967H1
  unsure 14, 41, 70-71, 87, 163, 241, 261: a, t, c, g, or other
gtaagttgctaggnaacatttagatggcattcttctctgangtgaaatgaaagatttagggtatgtttgnngtgacgcctaggccgncacaccgtgccacacttttcaaaccgcaggtgtggcggacgatttggccgccgcgggttagtcgcggtgtggcggngtaggcgccacatcaaacatgcccttagtattcagtcttgatattctgcagaccaaacttgttgcatcatgccctcangggagagtcaaactggtggngttt

SEQ ID NO: 5915 - DNA, 263 bp, Zea mays
  misc_feature: Incyte ID No: 700457969H1
  unsure 38, 91, 191: a, t, c, g, or other
attatgaatgagactttgataacctagtgctgtgtgtnatcaattactatggacttaagtggatatatttgcagagtgtatcgcgattggnttctgacattctaagtgtagctcttcgagtagtatatgtttgtatattcagagtccccatgtacaaagaggccgttttaattgaggtttccgtacctcgnttccctgtgcaaagttttcatcgatgttttagactacaacacatctgtatattttgtcgagagcatcagttt

SEQ ID NO: 5916 - DNA, 261 bp, Zea mays
  misc_feature: Incyte ID No: 700457976H1
  unsure 8, 19, 34, 50-51, 70, 72, 82, 87, 132, 134, 154, 183: a, t, c, g, or other
agttagtnttctttggaanatatcatttccaganaatttggcagtattcnnctatgtgtctgctggtaantntatagatgtnagganatgtagtctacattcatgttcttctcaactggactgtcagaagtntnctcacttctgcacaactagncgctcagcaggatagtgtgtatcggcttnatgctaacttctatgcattttgcgctgaaagtgtttcctgctatatagattgaagaaagtgagcagttgggttagact

SEQ ID NO: 5917 - DNA, 262 bp, Zea mays
  misc_feature: Incyte ID No: 700457984H1
  unsure 16, 208, 217: a, t, c, g, or other
cctatctggtataggncggagctgagcttctagcaacgtacagtgtatccgccatgagtcctttcggggcggtgatcacgccagaaaccctcaagtacatgtccaagtaccagggacgtgagatcacgcaggtggactgcgcacgggaggcgatgaggctgatccacgcggaagacaagaacctcaaggccgaggactcagcgtgggngctgaagangaagttcggcaacggcgtgagcaccatggtcctcgtctacaacgc

SEQ ID NO: 5918 - DNA, 260 bp, Zea mays
  misc_feature: Incyte ID No: 700457986H1
aaaaaaactcagtaggtgtcccggacacatttggtgatggaaacagtgctagggagaaaaaggaggttggtggttcagcagatgttgctacccccatgaggtgcaaaggtacatctgatggagtgagcttcggaagcgcagtacatagtgaagataatcttggtgaaaaccatgtgtggcttcaaactgctggggactcccatgtttgcacagaagggtctcaggaagcgcacccaatctcctctccagttgaccagtat

SEQ ID NO: 5919 - DNA, 264 bp, Zea mays
  misc_feature: Incyte ID No: 700457987H1
  unsure 3, 8, 11, 19, 87, 143, 150, 179-180, 208, 219: a, t, c, g, or other
acnccttntcnatgagatnattggctagggaacgactacccttcttcaaggacgagcagaaggagaagcttcgccggttcctataanatgttggggttaaactactacacctcacggttctccaaaaacatcgatatctcacnaaactantcacctgtgctcaacactgaccaccgccnncgccagtcaagaagttaacgggcctgangggaagcccantggtcctcctatgggaaatccatggatctacatgtaccctgaggg

SEQ ID NO: 5920 - DNA, 264 bp, Zea mays
  misc_feature: Incyte ID No: 700457988H1
  unsure 19, 27-29, 31, 33-34, 43-44, 50, 58, 64, 74, 94, 195, 197, 221, 227,234, 244: a, t, c, g, or other
ttgcgaagaagcgcggttnggacgagnnnangnncgcagatanncctaangaagagantgcatngctggccctncttctcctggcgtacccgtnccgcccggcctcggcggctccggtggaggatggcctgctcagcaatggtgactttgagacagcaccaagtggtggttttgtaaaatctgcttctgtagctnanggggcatcgtaatccctggtttgnacgaancaatggntcggttgaantcaatttcagcaaggccaac

SEQ ID NO: 5921 - DNA, 263 bp, Zea mays
  misc_feature: Incyte ID No: 700457989H1
  unsure 36, 192: a, t, c, g, or other
aaccaatccgtcgcagacactcaaggtcgcaggatncctccgccgcgtgagcacaaccagccccaggacgaagaggacgacgacaccgcaggcgtcgtcaagctcatcagcgccgagggcttcgaattcgttgttgacaggaaggccgccatggtctccaacaccctccgcaacatgctcacatccccaggnggcttctctgagacgcgccagggcgaggtccgcttcccagagatccccaccaacatcctcgagaagatctg

SEQ ID NO: 5922 - DNA, 273 bp, Zea mays
  misc_feature: Incyte ID No: 700457990H1
  unsure 8, 10-11, 29, 38, 52-53, 65-66, 96, 99, 104, 131, 138, 163, 175, 178,180, 183, 186, 216, 229, 242, 250, 255, 263, 265, 268: a, t, c, g, or other
ccggtgcngnngccgttccgcgctcaagntcaaggccngtgtccaacatggnntgcttgagcatnngctccggtactatgcctacggacagaacgntangcaanaatacatcacaattgttcaggagctantccctanactgggatgcaggtacaagtgtcgntataggtacgangangnaancantacgtctgcatcagcttcgaaggggcccangggacctgtgttnagcagtttgatgnatgatgangacgnatggcatnantcngatct

SEQ ID NO: 5923 - DNA, 264 bp, Zea mays
  misc_feature: Incyte ID No: 700457991H1
  unsure 9, 25, 156-157, 190, 214, 219, 221-223, 227, 231, 234, 237, 243-244,246, 249, 253, 256-257, 261, 263: a, t, c, g, or other
ctcctcctncgtgtcaacgcaagancaccacccaccttcgccaggcttttttgggtttaatttgtgttctcagccctgatgtttagtctgctagcactctgtgggtgctgttgtcgcaagatccaccaccatggtcaattgatttccgtgcccttnncgcactctgtgtgctgttgcttgaaaacatgcnagtttgatctccctaaaaaaaaanaaganannncccngaanaanaanaggtgnnanganaggnagnngagntng

SEQ ID NO: 5924 - DNA, 264 bp, Zea mays
  misc_feature: Incyte ID No: 700457992H1
  unsure 2, 9, 18, 30, 46, 58, 72, 88, 94, 113, 123, 130, 147, 152, 154, 164,167, 206, 214, 219, 234, 242, 250: a, t, c, g, or other
gnagaagangatcaaggnggtttctcatgngtggcaattggttaanaagcagaatgcntatctggatgaggnagcctgaggatattancaaggnagagtatgctgctttctanaagagctgancaacgantgggaggagcatctcgncgtgncncacttctctnttnatggtcagcttgagttcaaggctgtcctgtttgtgccgnagagggcnccctntagacctctttgacnaccaggangaagccgnacaacatcaagctc

SEQ ID NO: 5925 - DNA, 265 bp, Zea mays
  misc_feature: Incyte ID No: 700457993H1
  unsure 10, 32, 44, 64, 126, 180: a, t, c, g, or other
caacgccatnctccagaccatcgccgaggggnagtacaggactnctgatgcttggtggaaaggnatcgacatcagagtttacaaacgcagtctgtgatcacatctgagaaacggatgtgattcttncttctgattgttttgtcatcctaatatttttttgtcacatatgagaggagcttnagctttaagaggttaactggcagcacctcgaacttctttggggtgtttaacacggtttgagaccgtcaaataattttgtcacatt

SEQ ID NO: 5926 - DNA, 193 bp, Zea mays
  misc_feature: Incyte ID No: 700458003H1
  unsure 4, 31, 91, 162, 177, 187: a, t, c, g, or other
ggcncacgacatccgtgggcagcactggacnttcctggcctccttacagctacgccgtaggtacatattcgagcagatctccgtacatatncgcgctgcccaagctattcattgcctcattcactctcgtgctgacctttcttccccacgggctcattcgancgcgttgaggagganggcgatgtcnccaccg

SEQ ID NO: 5927 - DNA, 194 bp, Zea mays
  misc_feature: Incyte ID No: 700458004H1
  unsure 47, 65, 75, 96, 112, 136: a, t, c, g, or other
gtacatgacctgaataggactgaatactacatgaagacaactcaatngctaccacaaaccaagantactaaagcncataagatgtttaattttacngattttgctttttgantttctataccaaatatagaactcnttagtatgacaaccttgcattggtttctttgataacatactagacatggatgactgtt

SEQ ID NO: 5928 - DNA, 189 bp, Zea mays
  misc_feature: Incyte ID No: 700458005H1
  unsure 27, 35, 51-52, 60, 63, 69, 73, 75, 77-78, 84, 86, 100, 112-113, 155, 186: a, t, c, g, or other
cgtgagttgcctttgaaagcgtaaagncgtggcgngcgctactaccgcctnnactacttnctntctcgntttngncnncctccncnattaacgattactngtggggaggganngggaacgggagcgggaggggaatccaattgcgatggcctccnactcggcgatttcggtggggagaacaagtcnttg

SEQ ID NO: 5929 - DNA, 184 bp, Zea mays
  misc_feature: Incyte ID No: 700458006H1
  unsure 8, 39, 47, 49, 51, 54, 62, 65, 69, 72, 77, 88, 92, 98, 102, 104, 106,120, 142, 144, 171, 183: a, t, c, g, or other
atcatgtncgccatgacctaaatacacgggtgtcgggcnccgcgtcntncnaanatcgtctnagngcgnggntgacntcgacatgaanacgngggccnggancngngctgatgcgctggngcgcctgatgacggtcgtggcnanccctaggcagttcacggtgccggactngttcctcgacang

SEQ ID NO: 5930 - DNA, 182 bp, Zea mays
  misc_feature: Incyte ID No: 700458009H1
  unsure 79, 87, 153, 181: a, t, c, g, or other
gccactccaaacacttgacgccgccaactgcctacacaggtaaggccgccatggtctccggttcgggcgtgtgcggaantcgtggtngacgcgcgccaccacatgctgggccgtctctcctcgatcatagccaggagctgctcaatgggcganggtggtcgtcgtcgctgcgagagatctnc

SEQ ID NO: 5931 - DNA, 194 bp, Zea mays
  misc_feature: Incyte ID No: 700458012H1
  unsure 18, 35, 38, 47, 49, 56, 71, 91, 110-111, 160, 175: a, t, c, g, or other
gcaaaccgcgaacagagnccaacctcagcgatganccngcgcgcggngncacgccnaagtaacgcggggcngaaagctgtggctgccgctncccgtacacgacacaggtnnaacgtgtaacagacttacggcatgactggtgttcgagatcctagggagnacggacgcaacctgnagctgcagcaccccgccgt

SEQ ID NO: 5932 - DNA, 202 bp, Zea mays
  misc_feature: Incyte ID No: 700458015H1
  unsure 4, 46, 81, 109, 146: a, t, c, g, or other
ctcncctgcgcatacttcgtagacctaccgtacgcgtacgagcctncgatacatgtcggcctaatgcggaaagtacaaggntgagactcatcaagaatgctgcctaacnttggcacccccggacaagggtataccttgctgactgntgagtccactggcaccattggcaagcgcctttccagcatcaatgtcgagaacgttg

SEQ ID NO: 5933 - DNA, 200 bp, Zea mays
  misc_feature: Incyte ID No: 700458018H1
  unsure 13, 29, 39, 42, 94, 116, 134, 149, 177: a, t, c, g, or other
ctccatacccacnacgcgcacaggccaangccgaatacngcnaactactacagatactcgaccggaccgccgtgagacagagaaccgaaggagnggttgaccggtgctacggaggnagatgtttagcgggaacnagacagaagtgcaangtgtgcaccaagaacggtgtacccgatngaccagctctccaccgacggcgt

SEQ ID NO: 5934 - DNA, 193 bp, Zea mays
  misc_feature: Incyte ID No: 700458020H1
  unsure 58, 68, 99: a, t, c, g, or other
cgaggttgaacaacttacagagtggcaggtttgcagatgtacgaagaattggtatatnctgaaatggntaaatgcctgcctacggtatgagctgagaancaaggatgccccatacagggaagaactgttgcacgagatcttagacaagaccctgagccccaagtactgcaattgaaggccaaacagctgataa

SEQ ID NO: 5935 - DNA, 188 bp, Zea mays
  misc_feature: Incyte ID No: 700458021H1
  unsure 17, 21, 54, 67-68, 85, 93-94, 153, 158: a, t, c, g, or other
gttcacctccgtacgcntgancactaggccgaccgctgccgccctacgctacanctgacccacctgnnctggtacttacgactcntcgtcgtnngctttgccggcgggagacaacccatcacaccaggtgctttattgggtccgtccatacgncaggntggcgctaaggggggtctggcagctgcgaa

SEQ ID NO: 5936 - DNA, 191 bp, Zea mays
  misc_feature: Incyte ID No: 700458023H1
  unsure 26, 31, 35, 40-41, 44, 53, 55, 69, 74, 101, 125, 134, 156-157, 160: a, t, c, g, or other
ggcgtcagtgccgtgatgcagttccnccgangcancggcnncgngggcgaagncngtgggttcccgggngtggncgtaggaggtgttgcggcggcacttcnctaaagaagacggtaccgtggaanatgaggcgnatacaaccccaaggtgacccanngangaggccgtcgccatttccggccgactcctcc

SEQ ID NO: 5937 - DNA, 193 bp, Zea mays
  misc_feature: Incyte ID No: 700458025H1
  unsure 5, 10, 28, 41, 59, 86, 113-114, 118-119: a, t, c, g, or other
gcgancttcntgtacatgactggactcnttgggtgacagancatataaaccaaataccncgaacttgactcgagactctagatatnctttttattctgacatgctgaacatgnnctgnnactgctccactgctgctgttaggcaccttgacttcaagtggtgtggatgtatttactgctctttctggtggtgt

SEQ ID NO: 5938 - DNA, 176 bp, Zea mays
  misc_feature: Incyte ID No: 700458026H1
  unsure 105, 108, 144: a, t, c, g, or other
gtgaaccagtaagcgtgcacaagatttgaccactttaaagtttgttaccacgggatcaactctttgtaactggatcgcagataagactgttcgcatttggcaagngancgagaatggaaactataactgcgtccatacattganagatcatactgctgaggttgaagctgttacag

SEQ ID NO: 5939 - DNA, 193 bp, Zea mays
  misc_feature: Incyte ID No: 700458027H1
  unsure 7, 30, 48, 53-55, 60, 73, 92, 105, 114-115, 192: a, t, c, g, or other
gcaagcngagagaacatacagcccaaaggntccgcacccacacaactntttgnnncaacngcaaagggaccanatcctgaatattaccagcngaggatgtttacnctaccaganncagtacagatcacaaaggtgatgacatctactaacccagatttactgagtatggatgatgggttagctacatctaang

SEQ ID NO: 5940 - DNA, 189 bp, Zea mays
  misc_feature: Incyte ID No: 700458028H1
  unsure 93: a, t, c, g, or other
tgatgttggccctgatgccaccaaaacattacaacgaagacattggacaccaccaagactgttatttggaacggccccatgggagtgtttganttcgagaagtttgacagctggcactgaggcgattgccaagaagctagctgagcttacaaccacgaagggtgtcactaccatcatacggcggcggcg

SEQ ID NO: 5941 - DNA, 188 bp, Zea mays
  misc_feature: Incyte ID No: 700458029H1
  unsure 77, 99, 157-158: a, t, c, g, or other
caatcaggttctgaagttcaatactaaccgagtaccgggcttctactgtgtacttgccatggctgacaatggctgtnctcgcgaatattggtggatggnttgctgatactcttgttcaaagagggatctcagttacaaacgttcgtaagatcatgcnntcaattggtttccttggaccagccttgttc

SEQ ID NO: 5942 - DNA, 191 bp, Zea mays
  misc_feature: Incyte ID No: 700458030H1
  unsure 13, 19, 89, 95, 105, 109, 167, 184: a, t, c, g, or other
caccaactttgcngttganttgacataacaactatggcgttgacaagtatgacattggcacgggctttgggcctttacgcaattgctantgatgntgtgtaacangttngctgagaatctacaaataccaagggtggtaagatcacccgcgaaacctggtcctgtanaggaggatccactgttnttgcctt

SEQ ID NO: 5943 - DNA, 189 bp, Zea mays
  misc_feature: Incyte ID No: 700458031H1
  unsure 27, 35, 42, 44, 54, 73-74, 76, 97, 99-100, 102, 109, 111-112, 121, 124,131, 154-155, 178: a, t, c, g, or other
cgcgcccccgctcacttcacttctctnggtgcgcnccgatcngnaggtgcctgnctcctactcgtcggcgaanngntggcggtgcgctgctgacgangnngntcgtgangnngcgggtcangcngttacangaggccccacctcgaccgctacnngtgccttaagccaagctggcgcnggccaaagggt

SEQ ID NO: 5944 - DNA, 191 bp, Zea mays
  misc_feature: Incyte ID No: 700458034H1
  unsure 9, 11, 15, 18, 24, 34, 57, 83, 92-93, 99, 112, 116, 119, 122, 140, 144,148, 165, 185, 189: a, t, c, g, or other
ggcttggcntnaccnacntgtacntgtgtacccnccaccgcccgccatgccgacgangttgccccccaccgccgatacgcacnagatggagnntggtantggtgcggttgtncctnctnatncttcagataggtaccganagtnctgntaaacctttggaccaanagacaatgcgacggcttgancaanat

SEQ ID NO: 5945 - DNA, 223 bp, Zea mays
  misc_feature: Incyte ID No: 700458035H1
  unsure 23, 55, 73-74, 89-90, 101, 103, 113, 117, 124, 128, 132, 145, 147-148,157, 166, 178: a, t, c, g, or other
gagagctttaccccttacctgtnacctgaagacttaccgaacataccgaaccgtnctacctacctacctacgnngtaatacgaccgacnnccttactagantncatactcagnaggncgtgacngatngaangcgcgagaggttngnnggtcatggncgatgctgnacggagggtacncgcacctaccaaggtacctacatacctacgtacggtgacagggat

SEQ ID NO: 5946 - DNA, 188 bp, Zea mays
  misc_feature: Incyte ID No: 700458036H1
  unsure 13, 55, 64, 76-77, 102, 117, 161: a, t, c, g, or other
gctgacttgatcntgcacagcagacagcatggtggatgggtgccagttgcagcantggatgctnttgctaaaatcnnacgaagttgcaccaatcagggtttntgaagttgcaacctnttataccatgtttaacaggaactccggttggtaaataccacctnactggtgtgtggaactacaccttgtat

SEQ ID NO: 5947 - DNA, 161 bp, Zea mays
  misc_feature: Incyte ID No: 700458037H1
  unsure 2, 8, 33, 37, 40, 54, 64, 102, 105-106, 112, 115-116, 119, 126, 137,145-146, 157: a, t, c, g, or other
gnttcccnccctaccctaccaacctaccgcaancccnacnacccgaccgcgcangcacaacccnaccattggggggttaccccgacttacttccgatacttnacnncaccgntgnntcnccctacncgaccacccgngcttaccnnttcccctctanctta

SEQ ID NO: 5948 - DNA, 183 bp, Zea mays
  misc_feature: Incyte ID No: 700458042H1
  unsure 21, 27, 51, 73, 75, 77, 88, 91, 105, 126: a, t, c, g, or other
ggagagctgatgatttcaagntactcnataaggcctatgctacagaagtanctttcagctggcttgtggatgntnanaagcttccccnacngaatgaactgaganacatatttggacctggggaancgggaagcagaaggctacttatactgatgccaagctcacatatacagaaggacactt

SEQ ID NO: 5949 - DNA, 191 bp, Zea mays
  misc_feature: Incyte ID No: 700458043H1
  unsure 2, 29, 44, 125, 174: a, t, c, g, or other
cntgttctccgcctcaggggaggcatgcngatacttcgtcaagnccctacactggaaagactatacaccctacgaggtggagtcttctgacaccatacgaacaacgtcaaggccaagatccaggnacaaggagggcatccctcggaaccagacagcggctcatttttgctggcnagcgactcgaggacggg

SEQ ID NO: 5950 - DNA, 186 bp, Zea mays
  misc_feature: Incyte ID No: 700458044H1
  unsure 66: a, t, c, g, or other
tcatgttcgccatgacctcaatcaagggtgtacgggcgccgcttactaccaacatacgtactgcangatggccgactcgaacatgaacaagagggccggcgagctgacgcctgatgagctggagcgcctgatgacggtctggccaaccctaggcagttcaaggtgccggactggttcctacaacag

SEQ ID NO: 5951 - DNA, 188 bp, Zea mays
  misc_feature: Incyte ID No: 700458045H1
  unsure 30, 36, 42, 55, 69, 73, 88, 104, 116, 147, 170, 174: a, t, c, g, or other
tctccctagacagacagatcctcgtgcaancaaagngctaancttacctactgtncccgatggcccgcncgangcagaacggcgaggnagtccactggacggcnaggcgccaaggnagcagctggccaccaaggcggcgcgctagtntgccccggcgaccggcggagtgnagangccccaccgtttcc

SEQ ID NO: 5952 - DNA, 195 bp, Zea mays
  misc_feature: Incyte ID No: 700458054H1
  unsure 2, 4, 14-15, 64, 93, 106-107, 119, 143: a, t, c, g, or other
gnancccgtacagnnccctactacgtttttcatccgaccttacgcctaccaaaccgcgtgcgcnaccacggctacctaccaggaaagcgaganttactgcataagnncaacaaatcaanagcgtgatcagctcggtgccaacnaaacctcaacaaccaagtttcatgtctgatctcgacgtccagcttccatctg

SEQ ID NO: 5953 - DNA, 181 bp, Zea mays
  misc_feature: Incyte ID No: 700458057H1
  unsure 27, 29-30, 86, 92: a, t, c, g, or other
gaacatgttccactggacaggcaacantnntgggtccatctgatagcccatattctggtggagttttcctagttaacaatcctttncctccngattatcctttacaaaccaccaaagggcatttcgcactaaggtgttccatccaaacatcaacagcaacgggagcatttgcctcgacatc

SEQ ID NO: 5954 - DNA, 210 bp, Zea mays
  misc_feature: Incyte ID No: 700458059H1
  unsure 33, 48, 62, 69, 73-75, 83-84, 94, 108, 115, 156, 180: a, t, c, g, or other
ctacgacctagacagacacctactacgctcgtntacgaccgtacgcgnccgagctgactgtnacgcgtncggnnnccgccgannggatcaagtntacgccgacctacnacccgangacagaccttgccccaccgtgtcgcgaccatcgcctacgtnccttacgtacgaccaagtactgcnatccattttcgagcttcgaggaatcgacag

SEQ ID NO: 5955 - DNA, 70 bp, Zea mays
  misc_feature: Incyte ID No: 700458063H1
  unsure 3, 11, 20, 41, 55-56, 58, 61: a, t, c, g, or other
tcnccatccantagcgatgnggagcagttggctagttgttngcggtttccctaanntnacncatcctcct

SEQ ID NO: 5956 - DNA, 190 bp, Zea mays
  misc_feature: Incyte ID No: 700458065H1
  unsure 2, 9-11, 13, 35, 52, 56, 80, 99, 140: a, t, c, g, or other
cnacgagcnnnanaagaacaaaaaaagcaccaganataagtatgttccaganatgnttgaaggggactggattctataangacctgaagtaaaactgtnctactctagtcagggatccaaaatttactgataagtcacanaaaccaggagacaacagatctacacaaatgtatttcacgaatccatcatt

SEQ ID NO: 5957 - DNA, 182 bp, Zea mays
  misc_feature: Incyte ID No: 700458066H1
  unsure 2, 12, 49-50, 64, 159-160, 166-167: a, t, c, g, or other
gntgaatctccntttgagttccgtgacattggaggttactctggaagcnntctgcagtttaccntgatgcacgcactaactggcttgagaccgatgcttacccagctttggatgagttgacatccaagatcagcagccgcaacttggatagggtacgtnngtaaanngcgggatgacaagat

SEQ ID NO: 5958 - DNA, 182 bp, Zea mays
  misc_feature: Incyte ID No: 700458068H1
  unsure 2, 7, 13, 21, 52, 62, 71, 81, 87, 102, 177, 179: a, t, c, g, or other
cngctcnagcaanagcactcnagcaatggcttactgaggttgtccgccctancgaacgccgngctactaanggcacaaganaacatntggcggtcagctacnacctaacctcacgcccctgtcactgaggtgacgccgtggagcttggcatccctacggcgatctaccgccatgggngnctg

SEQ ID NO: 5959 - DNA, 182 bp, Zea mays
  misc_feature: Incyte ID No: 700458069H1
  unsure 68, 76-77, 88, 93, 134, 145, 148: a, t, c, g, or other
ctcgatactcgacacctagggtttcgtactcgaccgctctcgtacctaccgcgaagatgaccgaagancaagggtnngggaggcaganccggnagcgaggtaagaacgaggctgacgacgacaagcgcgagtcntcttcaagganganggcaggagtacgcgcggtgacccggatgctcggc

SEQ ID NO: 5960 - DNA, 159 bp, Zea mays
  misc_feature: Incyte ID No: 700458073H1
  unsure 62: a, t, c, g, or other
caccttgtgctgaggctttgcttactagtactgtatagcggttataggggctacagaacggnctggcttatatatacatacattaattttcctttcacatacatcattgagggtgtaaattaccatgtattaataagcaaactttttctaaacctcttt

SEQ ID NO: 5961 - DNA, 179 bp, Zea mays
  misc_feature: Incyte ID No: 700458076H1
  unsure 23, 79: a, t, c, g, or other
gtttctgcatgacacctactganggttgttagtctacccatacatggctaacgggagtgtggcatcacgtttacgagancggcagccatactgagccacctcttagctgggaaccaagaagacggattgcactgggatctgcaaaggactttcttacttgacatgatcactgcgatccc

SEQ ID NO: 5962 - DNA, 195 bp, Zea mays
  misc_feature: Incyte ID No: 700458077H1
  unsure 32-33, 42, 60, 81, 139, 177, 181: a, t, c, g, or other
gcgcgcctactaacatttcttctactatactnntgcctaccncctaccgcctaccgcctnaatcccatcccaagacagggntcgccatgtcggaactcggaggagcaccacttcgaatacgaaggaccgacgctggggntccaagacctacccgacagcaggctggcaccgtccgtnagancggcttacatcgtc

SEQ ID NO: 5963 - DNA, 185 bp, Zea mays
  misc_feature: Incyte ID No: 700458078H1
  unsure 9, 14, 20, 62, 76, 84-85, 157, 162, 165: a, t, c, g, or other
cccgaggtnagttnatccanaaatacgaaccggcgaacgcaccgtatcccatactcgaatancctccgcgctcagntacatggnngattctaccaaaacgatcggcggtggtggccctaacgttccggcgggatcccaccccgcgggcggaaaccangacgnggncagggggaggcgcgacgcgc

SEQ ID NO: 5964 - DNA, 179 bp, Zea mays
  misc_feature: Incyte ID No: 700458081H1
  unsure 97, 142: a, t, c, g, or other
ctaacacacatggaaccggttgcacattagcatcatgtattgctgctgaattagcaaaaggtgcaacaatgctgcacgctgttcaggttgcaaagcntttgtggagtctgctctttatcacagcaaagatcttgtgattggncatggacctcagggaccttttgaccacctcttcgaac

SEQ ID NO: 5965 - DNA, 184 bp, Zea mays
  misc_feature: Incyte ID No: 700458084H1
  unsure 82, 89, 163-164: a, t, c, g, or other
tgaacgactaacctagactgtgaacgcgaacgaagacacgcgatgtacctgccgcacaccgcggggcgctaactaccaagangcggttnccgcaaggcgcagtgcccgatcgttgagcgccttacaaactccctcatgatgcacgggcgcaacaacggcaagnnggtcatggctgtccgctaca

SEQ ID NO: 5966 - DNA, 182 bp, Zea mays
  misc_feature: Incyte ID No: 700458085H1
  unsure 2, 15, 87, 131: a, t, c, g, or other
cnaggacttgacaangagagttggagctaggattttgttgaacatacaacctactgaagtttatggtgataccacttgagcataccnacaaactgaggcctactggggcaatgttaacccgattgttgttnggagttgttatgctgagggtaagcgtgtagcagagacgctgatgttcgact

SEQ ID NO: 5967 - DNA, 177 bp, Zea mays
  misc_feature: Incyte ID No: 700458088H1
  unsure 165: a, t, c, g, or other
ctgtgatcggagttggagtggttgggtcaagctgtttacagatagcaaaagcctttggagcttacccaagtacattgcgtggatgtaccttgatgagaagcttcagaacgctacaacacttggagcaacccacactgtaaatgcagcaaaagatgatgcgttganaggataaaggaa

SEQ ID NO: 5968 - DNA, 184 bp, Zea mays
  misc_feature: Incyte ID No: 700458091H1
  unsure 19, 93, 176: a, t, c, g, or other
cgctgaacggacgactganccaccgaacagataaacatggccgcctaccgcctaccaccgtctaccggtcctagagaggacctccctggccanctgcccgggtatctccaccagcttcacgcggggcagccgggtgtcggcgaggaaccccctgatgagcaggaacctggagaggnatggcagg

SEQ ID NO: 5969 - DNA, 185 bp, Zea mays
  misc_feature: Incyte ID No: 700458093H1
  unsure 53, 64, 95, 176, 181: a, t, c, g, or other
caacgccatacctaccagaaccatacgccgaggggaagtacaggaactgctgntacttggtggnaaggctcgacatacagagtttacaaacgcanactgtgatacacatctgagaaacggatgtgattcttccttctgattgttttgtcatcctaatatttttttgtcacatatgngaggngctt

SEQ ID NO: 5970 - DNA, 180 bp, Zea mays
  misc_feature: Incyte ID No: 700458096H1
  unsure 15, 24, 31, 38, 41, 47, 60, 83, 118: a, t, c, g, or other
gggttttgctgctcnccgaccccnagctccnaaggccncancatcangcgcggccccccncacgtgtgaccgagatggcgctncgaatcaggggaccgatgattaccccagcttcaanctcgtcatcgtcggcgatggtggaatggtaaaactacatttgtgaagaggcatctcactgga

SEQ ID NO: 5971 - DNA, 152 bp, Zea mays
  misc_feature: Incyte ID No: 700458101H1
  unsure 33, 40, 50, 98, 135: a, t, c, g, or other
tgatgggcgttatttcatctccaattgcaaggntcagagnatcaaacttngggacatcaggaaaatgtcttccgtcgtgagatctcgcccagtgagtncgagtggactgggactataggtggatgccatttccanccagaagctcataatct

SEQ ID NO: 5972 - DNA, 157 bp, Zea mays
  misc_feature: Incyte ID No: 700458109H1
  unsure 5, 15, 25, 27, 72, 77, 86, 103, 106, 110, 123, 146, 148, 153, 156: a, t, c, g, or other
tgatntgacagacantctgatgctnanagtagatgcacagcttacccaaggaggcacattactcacaagtgnatgtntaactttgnctacaagggaagtgacnatngaancacaattccaatngggaacaatgcattctataggtngnagatnatnt

SEQ ID NO: 5973 - DNA, 277 bp, Zea mays
  misc_feature: Incyte ID No: 700458115H1
  unsure 9, 185, 189, 210, 267: a, t, c, g, or other
aagcaaganaactagaaaaggctcctcccgaccgcaacgcccctcatctccctcgaccccgacatccccgacccgatggcgcccaaggcggagaagaagccagcggagaagaagccggcggccgaggagaaggcggagaagacgaccgcagggaagaagcccaaggccgagaagcggctgcccgngtcnaagtctccggaaaggagggcngcgagaagaaggggaagaagaaggccaagaatagcgtggagacctacaagatctacntttcaaggtg

SEQ ID NO: 5974 - DNA, 286 bp, Zea mays
  misc_feature: Incyte ID No: 700458117H1
  unsure 12, 78, 95, 143, 146, 155, 191, 196, 201, 203, 211, 225, 228-230,232-233, 236, 259, 267-269, 276, 284: a, t, c, g, or other
ctcacccgccgnagccaaaccctctccagcagccgtcgtcgccaccgctgcaacgcggaggcgactcccatcgccgcnaagatgcaatcttcgtnaagaccctgacggggaaaaccatcactttggaggtggagtctcggaanacnatcgacaangttgaaggccaggatacaggacaaggagggcatccngccgnaacananaagcgggntatttttcgcgggnaannnanntgngaggacggccggaacttggcggntctacaannntccaganggtgtccncc

SEQ ID NO: 5975 - DNA, 271 bp, Zea mays
  misc_feature: Incyte ID No: 700458118H1
  unsure 43, 56, 130, 140, 144, 153, 167-168, 179, 186, 188, 198, 213, 217, 219,225, 228-229, 233-235, 237, 243, 250, 258, 264, 266, 269: a, t, c, g, or other
cctatactgaggaggaaacaaaggcaatggctgctgagattgnggtcgttgatggncctaatgatgagggtgaaatgttcacccgccctggtaaactcagcgatcgctttccacagccttatgcaaattnagcaagcagnccgntttgctaanggtgggcggcctanncgccggacctnagtcttntncacaaaggcnaaggcacaatgggcngaancnatggtncgnncgcnnnanctgatnccgggantccagccngatggngntcnga

SEQ ID NO: 5976 - DNA, 278 bp, Zea mays
  misc_feature: Incyte ID No: 700458119H1
  unsure 67, 143, 228, 234, 237, 239, 260, 264, 269, 273, 277: a, t, c, g, or other
ctgctgtagaacatctagttactggtgaaactatgcagatctcaacaagcagagagcaacggcgaanatgggagtactacctgcagaagacatactacaaaacggcatcattgatatcaaatagttgcaaggctgttgctatncttgcaggggcacacagctgaggtctccggtgcttgcatatgaatatgggtcgaaacctgggtctagccttccagttaattggangatgtnctngntttcaccggggactctggatncctnggganaggntccnt

SEQ ID NO: 5977 - DNA, 272 bp, Zea mays
  misc_feature: Incyte ID No: 700458120H1
  unsure 7, 44, 76, 218, 255, 257, 259, 261: a, t, c, g, or other
ccgaggncagatcagaccctggcattgccgcagccgtgattgcnagaagcgccggggtaggagagaactacaaganactctgcacttgtgatggtgtcaccatttgggaatcaagctaaacctgctaccagcgaattttccatactatttacttccgtgcgttgtacacacacattaacgtagaaacaatgcagagtggcaactgaacatgtgggatnagcttgactacttgaggataaaggctgttctcaaaananangnaaaaaagaccc

SEQ ID NO: 5978 - DNA, 269 bp, Zea mays
  misc_feature: Incyte ID No: 700458121H1
  unsure 224, 255: a, t, c, g, or other
cggctacatccggatgcagcgcgggcaccggcaacggcggcctctgcggcatcgccatggaggcgtcctttcccatcaagacctcgcccaacccgtcgcgcaagccccgccgcggctcatcaccagggacgcctcttcccagtgacaggctgatcatctcggcgtcgaactcgtactactggcacgtaagtaggagtacgttgacaggatgacatcctgctgcngctgtttgcttgtatattttcgattgtgttngtaggtttgattgt

SEQ ID NO: 5979 - DNA, 143 bp, Zea mays
  misc_feature: Incyte ID No: 700458122H1
  unsure 14, 18, 36, 54, 65, 72, 80, 82, 87, 95, 97, 107, 113, 117, 125, 127, 131: a, t, c, g, or other
caccagcagcagcnccanaaatcgagcaaacacaangctgctccatggcctcancaagccgaacnccatcgnctccgccngnggtcnagtcaatngnggtttctctntcttcngaanattctgtngngganccctacgtggga

SEQ ID NO: 5980 - DNA, 145 bp, Zea mays
  misc_feature: Incyte ID No: 700458123H1
  unsure 5, 24-26, 33, 37-38, 45, 47, 56, 61, 70, 93, 106, 110, 126, 131: a, t, c, g, or other
ccccntctccactccatcgtcaannnaggaacncggnnctaactnanccctagctnagggnagggaaacnagaccatggatgcctccaagctncgcgagcttcgcnactnggtcgaggcgtgcaanaagantccttcggctcctt

SEQ ID NO: 5981 - DNA, 270 bp, Zea mays
  misc_feature: Incyte ID No: 700458127H1
  unsure 4, 6, 19, 54, 76, 98, 106, 116, 121, 154, 159, 192, 226, 230, 247, 251,265: a, t, c, g, or other
cgantnaccatctcatccncaactccggaacgaacaagttaccatctcatccanacttccgcctcgaccggatctngtcggactcggatccgcccgancaccccgnggccgccgcngatcngagaagatggcagctgtcgacacattcctcttnagctncggagtctgtgaacgagggacaccctgacaagncctgtgaccaggtctcagatgccgtcttgacgcntgcnttgctgaggaccctganagcnaaggtgcttgtganacctg

SEQ ID NO: 5982 - DNA, 280 bp, Zea mays
  misc_feature: Incyte ID No: 700458128H1
  unsure 197, 216, 226, 246: a, t, c, g, or other
gccagccactccaaacacttgcgccgccactgcctcacaggtaaggccgccatggtctccggttcgggcgtgtgcgcgaagcatccgttggtggacgcgcgccaccacatgctgggccgtctctcctcgatcatagccaaggagctgctcaatgggcagaaggtggtcgtcgtccgctggcgaggagatctgcatgncgggcggcctcgtccgtcnagaagatgangtacctccgtttcctccgcnaagcggatgaacaaccaagccgtcccacgggccc

SEQ ID NO: 5983 - DNA, 147 bp, Zea mays
  misc_feature: Incyte ID No: 700458130H1
aatggtctctctgaattaaatctgatcgtggatggatttggactgcacgagaggagaggaggggtcgggtcagcttgaatcaggtgtcgcgttgccagggtggcgacctgtaataacctctccttcatctccaagattccttccttt

SEQ ID NO: 5984 - DNA, 145 bp, Zea mays
  misc_feature: Incyte ID No: 700458134H1
  unsure 13, 28, 37, 60, 75, 81, 86, 90, 97, 104, 107, 124, 126, 131, 134: a, t, c, g, or other
cgcagtccgcacnccctccccaatcacnccacccganaccgcgctgccgcagatttcgtnttcgaccgctaagtntccggngagangtangtggtanaaggctncgnagttttgggggcggagntnaaacnggnagtggtggctc

SEQ ID NO: 5985 - DNA, 286 bp, Zea mays
  misc_feature: Incyte ID No: 700458135H1
  unsure 126-127, 136, 155, 171, 182, 215, 232-233, 239, 244, 249-250, 254, 257,261, 280, 282, 285: a, t, c, g, or other
tgtccatgaggaatttggcatcgtggagggccttatgacaactgttcatgcaacaacagctacccagaagaccgtcgatggtcccttcgatgaaggattggagaggacgacgtggtgctggcccannacataattncccagctccactggtggcngcaaaaggctgttggnaaagtcctggntgagcctgaatggaaaaccttcactggtatggnccttccggagtgcccannacaaantgtcncggtnngggnatntganattcccggttgaacaacancnccnc

SEQ ID NO: 5986 - DNA, 269 bp, Zea mays
  misc_feature: Incyte ID No: 700458136H1
  unsure 190, 253, 257, 261, 267: a, t, c, g, or other
cctcaacaagatcctgctggagatcgcacagatccaagctcctgcggcgctgctcaaggcgagctcccccgaggagaccgtcgccgccatggtgacagggccagccaagtcatgactgcatgtatgtagtgtacacgaaaagagaaatgagtaagcacataggttgcaaaagggagggggaggaggtctngggattaactgaagccaagctgtgtcggtaataatgtagggagtttcaaagtgtgtctttctngctngttnaaagcngt

SEQ ID NO: 5987 - DNA, 283 bp, Zea mays
  misc_feature: Incyte ID No: 700458137H1
  unsure 30, 58, 84, 99, 107, 113, 158, 163, 180, 189, 194, 218, 230, 243-245,251, 260, 264, 267-268, 273-275, 281: a, t, c, g, or other
ccccaacgtcgcgccgctctccaagtggcngactccgcctcctcaagcttcgaccggntcaaggactacctcctcatggaggangagttcgtcgccgcntcaggagngcctcngacccccaggaggacaaggccgaggaggaccgatccaaggtcgangactnggaggcacccccatgancgtcgggancctgngaggaagatcatcgatggagagcnaaggccatcgtntcctacgttcggnnngaaccnaagtactangttnggnntcctnnngctttngg

SEQ ID NO: 5988 - DNA, 267 bp, Zea mays
  misc_feature: Incyte ID No: 700458138H1
  unsure 183, 192, 197-198, 210, 218, 228, 233, 246, 255: a, t, c, g, or other
tagaaaatgtagtggacttcagctggtctcccactgatcctatcatatctctgttcgtgcctgaaatgggtggtggaaatcagcctgcgagggtgagtctagtgcaaatccctggcaaagaggagctgcgacagaaaaaccttttcagtgtcagtgattgtaagatgtattggcaaaacagtngagaatatncttgnngttccaagttgntagatacncgaaaacaanaaagngcacctacacggntttgaagcngtttagaattaa

SEQ ID NO: 5989 - DNA, 281 bp, Zea mays
  misc_feature: Incyte ID No: 700458141H1
  unsure 14, 22, 73, 75, 101, 148, 169, 174, 183, 188, 238-239, 242-243, 272: a, t, c, g, or other
cgcgtttccaacangccagtcncctcccactcccagtcccatctcgacgacatggccgcagccggcagggccntnaagcgctgtgaaggagacgctcccgncgggccctcggctgccacctcccagccaactcccgtccttcgatggnaccaccaggctgtacatctgntactnctgcccgtncgctnagcgcgcctgggtcaccaggaacttgaagggtttgcaggacaacatggtnnttnntggccatcgatctgcaggacaaaccggcntgggtacaa

SEQ ID NO: 5990 - DNA, 278 bp, Zea mays
  misc_feature: Incyte ID No: 700458142H1
  unsure 143, 180, 190, 225, 238-239, 243, 248-249, 251, 258, 267, 269, 271-272,277: a, t, c, g, or other
gggatatatattcgtgtcctccgaattagtccttcctgcagtgtcctcgccgacagggaaagccgtgttgcaagaaggggaattccgctgcgagatccgtgaacggttcagagatggacacagaacggtgttcaccccctctntggaagcgattaagcatgtgcaagggatagaacggantcattctcancaagcccttccttgatgtctggcaggcaaatattncctgtcctcggannaatntgganntnctatggncaattgtanangnntggang

SEQ ID NO: 5991 - DNA, 275 bp, Zea mays
  misc_feature: Incyte ID No: 700458143H1
  unsure 7, 17, 24, 50, 68, 79, 122, 126, 146, 157, 176, 191, 218, 231, 271: a, t, c, g, or other
tcatttnctcacaatantgatcantgcctgacatgggctagatctgagtntgagggtctacttgagangactcccactnaagtagatcgcttttctgtcgaaccctggtggatatgcaaccncagnaagaactgctggtgatgcanaggctagagancaacttgagcgagttattncaatgcctgagacanacaagtgtgagaacattccaagattgnaattacctgggcnccggttgaagtttgaggattatttctccaaccgtgtaaancagc

SEQ ID NO: 5992 - DNA, 272 bp, Zea mays
  misc_feature: Incyte ID No: 700458144H1
  unsure 58, 177: a, t, c, g, or other
gcgaccgtatctgttgtgcactcgcggacccctgatcctgaaagcattgtacgcgaancgacatagtcatcgcggcagctgggcaggctatgatgatcaaaggtgactggatcaagccaggtgctgcggtcatcgatgtcgggacgaactccgtcgacgaccctacccggaagtccncggtaccggctcgtccggcgatgtggatttcgcagcggcgagcaaggttgctgggtactgactccggttcccggaggcgttggcccaatgacggt

SEQ ID NO: 5993 - DNA, 271 bp, Zea mays
  misc_feature: Incyte ID No: 700458145H1
atgaagagtgcaaggacatgcctttgatcctccgcaacaaggccccaaggtggcacgagcagcttcagtgctggtgcctcaacttccggggccgggtgactgtcgcctcggtcaagaacttccagctagtcgcggcgacacagcctgccgccggagccctgaccccatcacaggcagccccgcagccagctccgcctcctccgccggaccaagagaaggtcatactgcagtttgggaaggtcggcaaggacatcttcaccatggactactg

SEQ ID NO: 5994 - DNA, 269 bp, Zea mays
  misc_feature: Incyte ID No: 700458147H1
  unsure 16, 20, 27, 33, 43, 56, 68, 85, 111, 113, 121-122, 124, 142, 167, 172,181, 183, 189, 198, 203, 207, 213, 223, 248, 258, 262, 268: a, t, c, g, or other
tgcaagtcgtttggcnttangtttgtnaattgntttaaatganctggtatgcaaantagagaatatgncagtggacatacctgcnacattgtcctgtcaccagaatatgcngnacattttnnanaagttagttcatgtcggnaacggtaaaattggttcctgttggnaatancccattctncnagacanggttcccanaggcnctangaactnggtcccttgnccgtgttaacgagctttgctgtctngggactagantttntcatgna

SEQ ID NO: 5995 - DNA, 271 bp, Zea mays
  misc_feature: Incyte ID No: 700458148H1
  unsure 145, 182, 215, 243: a, t, c, g, or other
caaagaactaaagatgggttcctacttgggagttgctgcagcttctgctaaccctcctccttcatccatttgtgctacaaacccactgatgggaacgtcaagagaaagctggctattgttgggaagggtttaacttttgacagtngtggctacaacattaagaccgggccaggctgcagcantgagctgatgaaatttgacatgggaggctctgnagctgtatttggtgcagctaaagctttnggacaaatcaagcctcctggagtagagg

SEQ ID NO: 5996 - DNA, 265 bp, Zea mays
  misc_feature: Incyte ID No: 700458150H1
  unsure 121, 123, 165, 181, 183, 199, 206, 215, 222, 225, 229, 245, 248, 262: a, t, c, g, or other
cgcattcgttccaactcctgagcactttctcctcgtccccgacaagccaatcgaagccgagatacggccatggactccaccggcaccggagcagggggtaaggggaagaagggagcggccngncgcaaggtcggcgggccaaggaagaagtcggtgtcgaggtcngtgaaggccgggctcnanttccccgtcggccganatcgggncgtattgangaagggncgntacncgcagtagttgggtcnggngcccccgtttactnggt

SEQ ID NO: 5997 - DNA, 272 bp, Zea mays
  misc_feature: Incyte ID No: 700458153H1
  unsure 9, 63, 155, 159, 182, 205, 211, 228, 243-244, 260, 263: a, t, c, g, or other
gtgaagatnggtatggctgatgctattgtggatctcgtgagtagcggaacgaccttgcgtganaataacctaaaggaaattgatggtggagtagttctggaaagccaggccactcttgtagcaagtaaggaaatctctgcacaagcgtaaaggtntgcnggaggttactccatgaattggcntgaaagattagaagctcacctanggagcngactgccagagtttaangggcaccggcaaacnngaggggcaacatcggnagnaggaattgg

SEQ ID NO: 5998 - DNA, 281 bp, Zea mays
  misc_feature: Incyte ID No: 700458155H1
  unsure 29, 92, 108, 110-111, 121, 123, 127, 131-132, 140, 157, 167, 169,192-193, 207, 216-217, 221, 223, 227-229, 237, 240, 266, 272, 277, 280: a, t, c, g, or other
ttctctgaagcggcctgcaacattgactnaagaggttgttaggatacgacgagctcgtgagtcagattcaagaagcgggttcttcttggcgntctgtttgaagacttncnngcgaaagtgntnagcntttnnagtggcanaaagcaatccgcagcanaggttgaaangnaatgatttggtccgctctggggnntaaaagcagctgancttcatggnnaacntngcgnnnggcccagnggnttgaggctctggaatttttcaggaancaggangtagnttnt

SEQ ID NO: 5999 - DNA, 273 bp, Zea mays
  misc_feature: Incyte ID No: 700458156H1
  unsure 49, 53, 197, 213, 215-216, 218, 237-238, 242, 250: a, t, c, g, or other
ggccgagcaggcgatggccgcagcggcgtcaatggggcacccttacgcnccanccgagctggaccttccgggtttcgtgccgctgaagctgtcccaggtcgagatcctcgtgtcctacctcggcgcctccgtcttcgttttcctcgccgtctggctcgtctccggaagatgtgttagattatccaagaccgaccgtntgactcatgtgctggngnncnttcacagggttgaccccanntaantgatcgangggcccttcgtcttcactcctga

SEQ ID NO: 6000 - DNA, 269 bp, Zea mays
  misc_feature: Incyte ID No: 700458157H1
  unsure 50, 52, 56, 83-84, 98, 102, 109, 124, 145, 148, 153, 158, 176, 179, 188,199, 212, 227, 231, 233, 236, 240, 267: a, t, c, g, or other
aagtatcagaagagcacggagctgctgatccgcaagctgccgttccagcncntggntcgtgagatcgcccaggacttcaagannttaaattcgcttcnaganctccgcngtcgctgcgctgcangaggcgtccgaggcctacctngtnggggntcttngaggacaccaacctctgngcnattcacgcnaagcgcgtcancattatgcccaangacatccagctcgcncgtngnatncgtngggaaagggctaggcgtcgtcgcggtnga

SEQ ID NO: 6001 - DNA, 266 bp, Zea mays
  misc_feature: Incyte ID No: 700458158H1
  unsure 58, 62: a, t, c, g, or other
gcgaccgtatctgttgtgcactcgcggacccctgatcctgaaagcattgtacgcgaanccgnacatagtcatcgcggcagtgggcaggctatgatgatcaaaggtgactggatcaagccaggtgctgcggtcatcgatgtcgggacgaactccgtcgacgaccctacccggaagtccgggtaccggcttcgtcggcgatgtggatttcgcagcggcgagcaaggttgctgggtactgactccggttcccggaggcgttggcccata

SEQ ID NO: 6002 - DNA, 277 bp, Zea mays
  misc_feature: Incyte ID No: 700458160H1
  unsure 13, 17, 20, 25, 50, 59, 64, 96, 98, 100, 102, 118, 124, 131, 155, 175,201, 204, 215, 217, 240, 249, 261-264, 271-272, 276: a, t, c, g, or other
ctctgtctctggntctntcncctcnccgcccctttttatcgcccgatctncacacattntgganagaggagagagatagggagagattagagggancncncngcccaagcaaagaganaccgcngcgcganaagagggaggaagggcagacgggncgagcaggatgagagagatncatcagcatccacattcggcccaggncgngatccaggtcngnaacgcctgctgggaagtctaatnccttcgagntacggcatagannnncgatggnnccant

SEQ ID NO: 6003 - DNA, 260 bp, Zea mays
  misc_feature: Incyte ID No: 700458161H1
  unsure 52, 238, 241, 251: a, t, c, g, or other
ttgaggtgcttattgattgtgtacgcaaccctgcttttcttgattgggaggnaaaggaacagattttgaggctacaggcagagcttgcaaaatcatcaagttatcctgaaaattttcttttggaggctcttcattctactggctattctggtgctttagcaaacccactaattgtttccagaatattcagttagcagattgaatgcagatgtcctgggagcaatttataactgagaantanactgcttccngaattgttt

SEQ ID NO: 6004 - DNA, 262 bp, Zea mays
  misc_feature: Incyte ID No: 700458164H1
  unsure 7-8, 16, 18, 23, 59, 82, 89, 152, 173, 186-187, 214, 216, 227, 238,242-243, 254: a, t, c, g, or other
ctcaagnnccccaggncngaacncggaggcgttcgcgggagggtggtaccactcgggcnacctcggcgtgaagcaccccgangggtacntcgaggtgagggaccggatgaaggacgtgatcatctccggaggggagaacatcagcagcctcncaggtggagaaaggtgctgtncgcgcacccggcnntgctcaaggtctcggtggtcgccaggncngacgagcggtnaggctagtcgncgtnngcattcgtgangctaaagg

SEQ ID NO: 6005 - DNA, 102 bp, Zea mays
  misc_feature: Incyte ID No: 700458167H1
  unsure 8, 22, 24, 57-58, 61-62, 77, 84, 86, 90, 93: a, t, c, g, or other
ctccttcnaactcttgtttctncnacgccaggggcgcaaccatgggtcagcagcagnnagnncggcggcagagcggntggccangntcgnttnacacctgag

SEQ ID NO: 6006 - DNA, 131 bp, Zea mays
  misc_feature: Incyte ID No: 700458168H1
  unsure 9, 36, 42, 44, 55, 65, 72, 88, 94, 111-112, 127, 130: a, t, c, g, or other
gagcttaancacatggcgaacaggggcttgcatcgngctctntncctcgtccttntccgtgctgntgtccantttggcagccgggcanatctgnttccagggcttcaactnngagtctgtgaagganacnc

SEQ ID NO: 6007 - DNA, 283 bp, Zea mays
  misc_feature: Incyte ID No: 700458169H1
  unsure 265, 276: a, t, c, g, or other
atggtgtctcgtcttcatggtacaggtaaaggccgaaacaccatagaagaccaacaatttctccacattcgtctatgccggccgtgctctgttcagatttgcgcttgaggggctgtgctctactgttgttgatcagtaagtctatcagatacccatcccattgctgctaggtccttgagctgttgtaacgctggtactatgttgtttgctcgttttggtaacctttgtccttgcaaaaaaatgttgtcagctacaattgggtaanggttaatgganctattag

SEQ ID NO: 6008 - DNA, 274 bp, Zea mays
  misc_feature: Incyte ID No: 700458171H1
  unsure 17, 28, 30, 144, 150, 160, 190, 211, 218, 225, 244-245, 255, 261, 267,269-270: a, t, c, g, or other
ggcccagctgctgggcnccaccgtggantncctgctcctcgggttcgtcacccacggcaaggccatcccgacgcacgcacgtccgcgggcatcagcgagctggaaggcgtcgtgttcgaggtcgtcatcaccttcgcgctcgtntacacngtgtaacgcnaccgccgccgaccccaagaagggcttcgtnggcaccaatcgcgccatggcncatcggntttcatngtcgggcgccaaacatccnngctgtcggcngcgggngacttngnnaaaa

SEQ ID NO: 6009 - DNA, 265 bp, Zea mays
  misc_feature: Incyte ID No: 700458172H1
  unsure 134, 147, 173, 188, 208-209, 213-214, 223, 241: a, t, c, g, or other
cctgctgggaaggctgcccagcctgcggcgaccaccaagttcccgaccaagcccgctcctccctgcgcagacggttcgggatgcacgcggcggtggctcatcagctcgtggaggctttggccgtggtgaacgtngccgtggcagagntggacggggatatggccagaaccgtngcttcagtgggtganaatggcagtgacttccaggnncccnntcatggcgnagctatggggatggtgcngtaatggtggatctgaaggagaaa

SEQ ID NO: 6010 - DNA, 263 bp, Zea mays
  misc_feature: Incyte ID No: 700458175H1
  unsure 74, 102, 139, 178, 180, 186, 188-189, 205, 249, 257: a, t, c, g, or other
ttggatctgaacccaagctccgagtcgctttcggggtgggcattctcctcttcgtcttcggttgcaagaaaganaaagcatcatggacggcttccccaagancgtcggcggtggcggccctaacattccggcgggatcncaccccgcaggcgggagccagggcggcggcaggaggagncncgacgnannggacgcagtatccgtntgtgactggtatttcagtcattgccttgaaatacaaggatagtntgatcatngcatgt

SEQ ID NO: 6011 - DNA, 121 bp, Zea mays
  misc_feature: Incyte ID No: 700458178H1
  unsure 45: a, t, c, g, or other
ctcttattcgtaactcgctgtcggcacgaaagttggtgtgtgttntagcagaatgctttctgtccgtgaaagtaaacttgaaactgcttattacgactgaaatgatattgtcgttcccccc

SEQ ID NO: 6012 - DNA, 161 bp, Zea mays
  misc_feature: Incyte ID No: 700458179H1
  unsure 3, 45, 74, 76, 84, 87, 94, 97, 101-102, 112, 139, 146, 155, 160: a, t, c, g, or other
ggncgaccaaccctctcccaacccgactagtcggactcgcagctncgccccaagtccaggtccaagcatggaantngcggcggngtnggcgagnccncgtnntgctcgtggntgccatctgcggctccctccgcaaggnctccttnaaccggggntcctnc

SEQ ID NO: 6013 - DNA, 227 bp, Zea mays
  misc_feature: Incyte ID No: 700458182H1
  unsure 63, 70, 85, 93-94, 101, 103-104, 118-119, 129, 136, 138, 140, 150, 156,162, 171, 174, 186, 191, 214, 216, 219, 225: a, t, c, g, or other
cgtttttcctttttcctggacagccactgcaacttcctcgcaaatccctcccacccggtttanccggctncgctgccacgtccgngactacanntgctgtngnnaccatggtcaagtnncaagggcatnagggtcnangngctgggccancccgangtgctncggtgagangangttggtaggtanagggnagcccggtgaagggggagatccncnatnagggangc

SEQ ID NO: 6014 - DNA, 285 bp, Zea mays
  misc_feature: Incyte ID No: 700458184H1
  unsure 19, 30, 32, 45-46, 56, 75, 120, 144, 146, 152, 157, 160, 170, 182,185-187, 208-210, 215, 224, 226, 230, 232, 234, 237, 243, 253, 263-264, 277,279: a, t, c, g, or other
ctgacgacgagcgccaggngcgcatgattncncgccagattgagnntgcgcacaantccttagctaaacccaatngtggtggtgctgccgagggcgagcctaagtctggcagtgaagganagtattcaagttcggatgatgatnancaggancccgnaangataactctngagaggcagatnagnnncccaggtaagattgcgatttnnncttcnagagtgtantncccntngnccncaggtnaaatcctttngacgataagnngaaggtgaaattngnttttga

SEQ ID NO: 6015 - DNA, 274 bp, Zea mays
  misc_feature: Incyte ID No: 700458188H1
  unsure 2, 6, 11, 19, 35, 47, 61, 83, 108, 111, 121, 128, 133, 142, 156, 165,167, 191, 197-198, 212, 215, 222, 234, 237, 250, 258, 260, 263, 269, 271, 273: a, t, c, g, or other
gnagcngccgncggcggcnatcgcccaggagcccngagctgtttctncgtcacaggaatgngccaatgacggcatccagtacngcagtggtggacgcctttcacggcngancccgttcaanggcaagncccgncgcggtgtncctccttcgaggangccgccaangnccgccgacgatcggtggatgcagnccgtcnncgccgagttcaaanatntcacganaccggttcctcntcnggggaaaaagtcntccgcggncnggngccgtncngnt

SEQ ID NO: 6016 - DNA, 260 bp, Zea mays
  misc_feature: Incyte ID No: 700458190H1
  unsure 4, 10, 55, 236, 248, 252: a, t, c, g, or other
cttntcaggnagaactgcaactacacggatatatatgagaaggtacgaaggctanaggagcgctatgaaaaattggtgagcacgggcactgtaccgagtaaagaagatgagctccagatgtataatctctctaaaacaatctggggagagaagtcaaaggaggctactgctgccattacgtctcaaaaaggtggtgctgtgacaaagcgtaagaaggggcaggctaacaaagagangatggatggaantgcnaagagtgg

SEQ ID NO: 6017 - DNA, 258 bp, Zea mays
  misc_feature: Incyte ID No: 700458194H1
cagatcccaagctcaccctagagggggaagagggcgaccgaaggcggcgatgggtttcatcatggacttcgcggagaatctgatcctccgtctgatggaggacccggacaagcgcgaccaggttcggcgggagcatgtctacaagatgaaggagcggtgcgagcgcactaaggcggcgtggagcctccctctgcgcccctacggcttctggacttcgaccgcttcaactcgcagctctcctgggatccccagatcagc

SEQ ID NO: 6018 - DNA, 257 bp, Zea mays
  misc_feature: Incyte ID No: 700458195H1
  unsure 20, 142, 179-180: a, t, c, g, or other
attaaaggaggctgagaagnagcatcagaaggagtcagaaaggatagagaaggaacttgctgaaatggaggaaatgaggaaaaagatcagtacaatgacagcagatgattactttgagaagtaccctgaactcaggaagaantttgacgatgaaatccgtaacgataactggggatatnnaagagattggagagaactcttatgatgccattccatgtccgtgaagaaccaataattttccctgtgccctgattggg

SEQ ID NO: 6019 - DNA, 211 bp, Zea mays
  misc_feature: Incyte ID No: 700458196H1
  unsure 16, 19, 43, 47, 51, 55, 63, 67, 92, 97, 100, 109-110, 116, 127, 150,152, 155, 157, 168, 173, 177, 179, 181: a, t, c, g, or other
ggaccgcagcggcgcntangtggccaggcaggccgccaagagnatcntggncagnggatcgcncgcngctgcctcgtgcaggtgtacgtacnccatnggntggccggannccctgnccgtgttcgtnaactcgtacgagcaccggcacgntnaangncaaggagatcntcaanatcntnanaggagaacttcgacttcaggcccgggatga

SEQ ID NO: 6020 - DNA, 294 bp, Zea mays
  misc_feature: Incyte ID No: 700458201H1
  unsure 173, 211-212, 214, 245, 258, 263, 266, 279-280, 282, 286, 290-291, 293: a, t, c, g, or other
gggtgttctacaaggccggggagtatgccgactcagaaccccaacttcgtcggctgcgtcgagggtgcactcggcatccgcggctggctcgagtcgcagggccatcagtacattgtcaccgatgacaaggaaggccccaactgtgaactggagaagcacattgaagacatgcntgtgcctgattaccaccccattcgacccagcttatgtnntnggcagagaggataaagagggcgagtaatctngggcttcttctcnagggnagnaatcggctccgannanatgngctnncng

SEQ ID NO: 6021 - DNA, 284 bp, Zea mays
  misc_feature: Incyte ID No: 700458202H1
  unsure 206-208: a, t, c, g, or other
gacgactcttggccaacagaagtgtttgagcttgtcactggagagaaatcgaagacattggaaaggcttgaccctggtgccactgcttcacacacatatgtcctggagaccaaaacacagggcaggttccagggttcaccagctatcattacataccgtgttcccacaaagacagctcttcaggaggcatactcaactcccatttnnnccactggatattctcgctgagagacctccagagaagaagtttgaatgggtaagaggctgtgatgaatacgggtcac

SEQ ID NO: 6022 - DNA, 275 bp, Zea mays
  misc_feature: Incyte ID No: 700458205H1
  unsure 80, 153, 155-157, 273: a, t, c, g, or other
gcgccacctcaagcgctgggacgccctgctggaggaggtgatccacgagcacgtggagatgaggaagctgtccggcgacngggagaaggagtcggacgacttcatcgacatcttcctctccagatacgaggagtacggcttcaccatggatancnnncagtccctcctcatgaacgtgttcgaggcagccatcgagacctcatatctggtgctggagtccgccatggccgagctcatgaaccacaggcgcgtcatgaagaagctgcaacggangt

SEQ ID NO: 6023 - DNA, 270 bp, Zea mays
  misc_feature: Incyte ID No: 700458207H1
  unsure 161, 196, 230, 243, 246: a, t, c, g, or other
caggcttcatcaacacatagagaagggtaatgaagatggattgttcattagttcagtagcatcttcagccaatctttgggctctcattatggatgcagggactggtttcacatcccaagtatatgaactgtcacccatattccttcataaggattggattntggagcagtgggaaaataactactacatcagtgcnatagctggtgcaatgaatgggagttcctggtggncatgtcaaaaggnacnccttacactcagcagtcttaaaat

SEQ ID NO: 6024 - DNA, 271 bp, Zea mays
  misc_feature: Incyte ID No: 700458210H1
  unsure 171, 189, 203, 212-213, 217, 225, 231, 234, 248, 262, 268-269: a, t, c, g, or other
gtccgctgggttcttcctgattcatacttggatgtcaaaaacaaggactatggaggcgaacccttcataaatgggcaagctgttccttatgatcctaaatatcatgaggagtgggtgagaaacaatggcccgtgccaatgacagaaaccggcgcaatgataggccccgcanctttgacaggtcaagganctctgacaggagangggagaacnngcanactaccanaacagnggngggggcctcctgcncaaggtttcaatgncccccnncc

SEQ ID NO: 6025 - DNA, 265 bp, Zea mays
  misc_feature: Incyte ID No: 700458211H1
  unsure 189, 205, 218, 226, 228, 237-238, 245, 251, 254, 256, 258: a, t, c, g, or other
gtgctccaaacagagggttcctttcccgctttggtgaaccgtctgccagttatcaaatctgaatctctggagttctctcctgtcgagaatgcgattggaatgatcgaaacaaggacagctgcattgagaaatgagctagaagaaccacggagttctgaaggtgatcaactcccaaggcttcagagctgncaaaggatactccaancaagtgtggctgngaaggtcnancggggggtnnaatgtgngcatgnttntnangcggggg

SEQ ID NO: 6026 - DNA, 269 bp, Zea mays
  misc_feature: Incyte ID No: 700458212H1
  unsure 3, 8, 21, 59-60, 81, 87, 95, 98, 117, 153, 170, 182, 188-189, 202,205-206, 221, 228-229, 231, 239, 244, 251, 260-262, 265: a, t, c, g, or other
agnacagnatgctgctatganagcactgaagaagcaggagaggcgcaccaagaagactnnccatcatgatgatgaagtgtnaaagangatgagtncanctgagtcgagccgagagcnattgtgaggacgaggcaaccatgaatgaccagcagntgcctggtgatgtcaanagcggttcccgnggttgnnggcatcaagcatnctnnggctgtcccacgganggagtgnnanaaggatgnaagangggccangagagaaannngangaaa

SEQ ID NO: 6027 - DNA, 170 bp, Zea mays
  misc_feature: Incyte ID No: 700458213H1
  unsure 48, 52, 63, 66, 98, 109, 115, 126, 130-131, 137, 140, 150, 155, 163: a, t, c, g, or other
taaggcaggaggtaattgtggaactcgtggaccaatgccgcacttacnagcngagagtagtgnagnctagttaattctaccacggataaggaccctangtcgcaggggnctgacnctgaataatantttnnagagtngtnctaggcaacnctgcngacaatancagtcgg

SEQ ID NO: 6028 - DNA, 166 bp, Zea mays
  misc_feature: Incyte ID No: 700458216H1
  unsure 25, 50, 56-57, 59, 63, 76, 91, 100, 102, 104, 131, 144, 146, 152, 155,162: a, t, c, g, or other
aaaagtctattttattatgagcttnctttgcacttaaaaattagcatgcngctttnngnactnggaagtgtttcanaaaattatatgaccngattgcacncntnctaacttggcttactcccaccatggcnggttgattttgtngngaagtnagnccccatncccc

SEQ ID NO: 6029 - DNA, 280 bp, Zea mays
  misc_feature: Incyte ID No: 700458220H1
  unsure 46, 79, 117, 124, 135, 156, 210, 226, 259, 273: a, t, c, g, or other
ggaaagaacagaatgctgctatgaaagcactgaagaagcaggagangcgcaccaagaagactgccatcatgatgatgangtgtgaagaagatgagtcatctgagtcgagcgagagcnattgtgnaggacgaggcnaaccatgaatgccgagcgganatggtgatgtcaacagcggttcccgaggttgttgcatcaagcatctcagctgtnctcgcgatggagtgtnataaggctgccattgaaggccatgaagaaaatnggagaaggaacaantgaaggc

SEQ ID NO: 6030 - DNA, 264 bp, Zea mays
  misc_feature: Incyte ID No: 700458225H1
  unsure 127, 150, 192, 198, 205, 226, 250, 254, 263: a, t, c, g, or other
gtgaagatgggtatggctgatgctattgtggatctcgtgagtagcggaacgaccttgcgtgagaataacctaaaggaaattgatggtggagtagttctggaaagccaggccactcttgtagcaagtnggaaatctctgcacaagcgtaanggtgtgctggaggttactcatgagttgcttgaaagattagangctcanccaagancaatgcagaattaatggtcancgcaaacatgaggggcaacagcgnagangaagtggcng

SEQ ID NO: 6031 - DNA, 275 bp, Zea mays
  misc_feature: Incyte ID No: 700458226H1
  unsure 77, 146, 186, 191, 193, 201, 205, 211, 213, 232, 234, 248, 252, 264,273-274: a, t, c, g, or other
tacgacgagtctggcccggcaattgttcaccggaagtgcttctagggtttcacaagttcctcgtacgttacctagtnctcaaattatgtcccctccatttctcgagatatgtgtggcagatttgcatgatacgtttgtttgtttcnatcggacctgaagtcttcttggggataggctccccccttnatatntngaggctcnaatnccatgngngagcacgctgtgtctgttngnaaacactggttcgnaaanaggggttacaanattaaattnnt

SEQ ID NO: 6032 - DNA, 269 bp, Zea mays
  misc_feature: Incyte ID No: 700458229H1
  unsure 121, 137, 154, 178, 238, 264, 267: a, t, c, g, or other
aaagtcttcagctcctccgatccagatggaaagggagctaaggcccagaaggcagacaaatccgaaatgccaagaggagatggccatttggaaagtccaagcatcggagccttccatatcnacggtgccaggcatgntccagcatagctccgtngccatacaccaccagcaactcagncccactctctggagatcaaagatgtcaatccagttgaaacagacagtgagcagaacaagnatgtcctactccgttgcgcttgcgtntgntg

SEQ ID NO: 6033 - DNA, 275 bp, Zea mays
  misc_feature: Incyte ID No: 700458231H1
  unsure 80, 153: a, t, c, g, or other
agcttactggaattctcagtttaggggccttgatgcctggggaatcgaggaaatatggcacaactattgcccctggtctncatgcaccagttcatcagcatttctttgttgcccgtatggacatggctgttgattgcaaacctaatgaagctncataaccaggtggttgaggttaatgttaaagtggaaagtgcaggcacacataatgtgcataataatgctttctatgctgaagagaagttgctccaaatctgagttgcaagcaatgcgtgatt

SEQ ID NO: 6034 - DNA, 280 bp, Zea mays
  misc_feature: Incyte ID No: 700458233H1
  unsure 170: a, t, c, g, or other
cctctgccacctcgccgtcggcatgacaacagggtcgaccccgggttcggccccctctcagagaaaacgaaattctaccaaggattccgttgccttgtacgcggtgcaatgctataagtgctacaaatggagtacggttccaaaagaagaattgagacgcttcgtgaganttcactaaggatccatggttctgcagcagacgaccagacagctcttgtgaagacgatgctgacattgagtacgacagcagccgcatctgggttttggacaagcccaacat

SEQ ID NO: 6035 - DNA, 276 bp, Zea mays
  misc_feature: Incyte ID No: 700458234H1
  unsure 200, 275: a, t, c, g, or other
caaatttgagactcagttacgtgactttgtggtgaagaacacgattcatgaccgtgtccattttgtgaacaagacattggcagtggccccttacttggcagcaattgatgtgcttgttcagaattctcagggccgtggagaatgctttggaaggataacaattgaagcaatggcattcaagttgccagtattgggcacgnctgctggagggaccacggagatcgtcctggacggctcgactggcctctgcatcctgctgggaaggagggcgtggnc

SEQ ID NO: 6036 - DNA, 273 bp, Zea mays
  misc_feature: Incyte ID No: 700458235H1
  unsure 29, 60, 131, 229, 269: a, t, c, g, or other
cgggaggcgatgaggctgatccacgcggnagacaagaacctcaaggccgaggactcagcntgggagctgaagaagaagttcggcaacggcgtgagcaccatggtcctcgtctacaacgccaccggggccancctgagcctggtggacgacgggaaagactggatgggctccgtctacagctcgccgatcccggacaccttccacaacgggcagtggatcggcttcctcnaacgtcaaacccggctcgctggcgcaaggcagccagccgncggg

SEQ ID NO: 6037 - DNA, 159 bp, Zea mays
  misc_feature: Incyte ID No: 700458236H1
  unsure 65-91, 97, 107, 142: a, t, c, g, or other
ggaggagaaccgtgagcagagagacatggcgcgccaccaccagcagcgggcgctgctcctgttcnnnnnnnnnnnnnnnnnnnnnnnnnnntgcccngaccctcgcnggcgcgtggggaaaggagggccacatcatggtctncaagatcgccgagaaat

SEQ ID NO: 6038 - DNA, 152 bp, Zea mays
  misc_feature: Incyte ID No: 700458240H1
  unsure 104: a, t, c, g, or other
gccttgtttcctgccttatatcttgtatttcgacttattacagagttgagggttcttgcttaatttagatcaagtataaaatttgtatgacttcaagtctcatnttatctgaaaggtttttttctcatttaatctgatgtggcattttcgtc

SEQ ID NO: 6039 - DNA, 152 bp, Zea mays
  misc_feature: Incyte ID No: 700458241H1
  unsure 43, 54, 91, 117, 127, 138, 144: a, t, c, g, or other
gtcgatacggccacaacggcggcctggatggagaagcaccggnagatgtacgancgggccacccggcacccgttcaccgtctccatccgcnacggtaccgtcgacatgtctgccttnaagcgttggntgagccaggantatctntttgtaag

SEQ ID NO: 6040 - DNA, 150 bp, Zea mays
  misc_feature: Incyte ID No: 700458242H1
  unsure 10, 28, 40, 48, 64, 78, 91, 114, 118, 125, 144, 147: a, t, c, g, or other
gccacctccnccttttgaaccaaatggngcaccacatggnaatgctgnaatgcttgggccaatnatgggtggcccagnaccgattatagcnatgcctccaaatttccgccatgntccncgccgcntagataattataacgactngantct

SEQ ID NO: 6041 - DNA, 261 bp, Zea mays
  misc_feature: Incyte ID No: 700458243H1
  unsure 64, 120, 124, 127, 161, 167, 175, 180-181, 190, 194, 196, 200-201,209-210, 223, 226, 229, 232, 253: a, t, c, g, or other
aggtattagcagtcgaccggttcctcggagcacgatgaagtttgttgctgcctacctgcttgcngtcctcgctgggaacgccagcccctccgctgacgatttgactgccattctggagtnagtnggntgtgaagttgccaatgaaaagatggaactcctgntgtccnaactgagnggtanngacatcacngagntnattnncggcgggnngggaaaaattttnttnagnccnatgtggtggcggcggtgtcgntgttgggg

SEQ ID NO: 6042 - DNA, 268 bp, Zea mays
  misc_feature: Incyte ID No: 700458252H1
  unsure 20, 31, 267: a, t, c, g, or other
gtggagacaaagtggtagtnggagaacccantgaaggcagttgcatgccatctgaagttgagggcaaaacgggagagggagatgctgaagaaaaggaaaggacagatgaagctggaaatatccgataaaattagcaaggatgacactgggaagaaagatggagatgacactgagaagaaagatggaggtgatgatactggaggtgaatcagagcagaaagggcaaacaccatcagcaacacccctttctcgtttaagaatctgtcang

SEQ ID NO: 6043 - DNA, 261 bp, Zea mays
  misc_feature: Incyte ID No: 700458254H1
  unsure 252-253, 259-260: a, t, c, g, or other
ctaagttatgtgatttatatgaaaatgactcaatttttgacaaatttgagtgttgtcaaagtggtgatggattaagagtagcaactggttcctacagcaacattttccgtgtgtttggttgcggtactggtaacagtgaggcgacaacacttgaagcaacccgaaaccctacaaggaggcagctccagaatcccactagagctaccagatcccctaagttctctgacaaggacattagacgaggtggagaanncactgnnt

SEQ ID NO: 6044 - DNA, 268 bp, Zea mays
  misc_feature: Incyte ID No: 700458255H1
  unsure 2, 178, 180, 182, 184-185, 190-191, 232, 238, 241-242, 249, 251-252: a, t, c, g, or other
gngacgccgccgccgcaagccgtccgccttgcccctcgaaggcttggtcctcctccttgtatcccgacctcccacgcgacagacccgtttccccgctaggctagagttatcgttcctctgcagcgatggcgatcaagcggaccaaggcggagaagaagatcgcgtacgacaagaagcngngnannaagtnncgatgagtacaaccaaggtgctcatcgccctcgccgacaangtgggntcnnaagcagntnnaaagacatcccgcggg

SEQ ID NO: 6045 - DNA, 265 bp, Zea mays
  misc_feature: Incyte ID No: 700458256H1
  unsure 93, 201, 210, 224, 227-228, 236, 241, 247, 256, 259: a, t, c, g, or other
ggagaatgaagcaacatgagaaggttcttgaggaaggtgtcctcaacccagaatcaactgttgttgcgatcttcccctctcctatgcattatnctgggccaactgaggttcaatggcatgctaaggctcgtattaatgctggtgcaaatttctatatccgttggaagggatccctgtctggtatgagcccaccccacaganaaaagggcnctctatgatgccgntcnnggaaagangtttntgagcnatggccccnccncagaaa

SEQ ID NO: 6046 - DNA, 259 bp, Zea mays
  misc_feature: Incyte ID No: 700458257H1
tatctatctagcgagagagagagaggaaagctagctagctagcatggagtgcggcagaagaaggcagcaggcggtgtgttggcgctgctgcttctccagctggtgttagctccgacgacggcgacggcccgcctcctgcaggcggatacctccaccgtggttggcctggacatcatcgcgagggagtttggacatccagtgagaggcatcctctgtggtgaaacctgtgtcttcctaccatgctatacggcagccattt

SEQ ID NO: 6047 - DNA, 263 bp, Zea mays
  misc_feature: Incyte ID No: 700458259H1
  unsure 23, 68, 92, 119, 143, 146, 151, 178-180, 183, 197, 203, 209, 215, 218,222, 224, 228, 232-233, 246, 248, 251-254, 257-259, 262: a, t, c, g, or other
cgactggtgaggtgatccttggnaagcagccgctttccccaccagcccttagtggtgatctgggaatnttcatggcctgggtggatgatgtnagaaagctcaaggtcctggataacgcngatacccctgataatgcatgactncgnaaaanaatgggacacaaggaattggattcagnnnganggagaacattttcngtgttncagacnaagatnatnaagngnaccnaggnnaaagaattagtgncnacnnnngcnnnagnc

SEQ ID NO: 6048 - DNA, 268 bp, Zea mays
  misc_feature: Incyte ID No: 700458260H1
  unsure 7, 181, 201, 210, 212, 218, 221, 226, 245, 248, 251, 254: a, t, c, g, or other
gcgaganagaacccaaacggagagagacaatcgagagagatggcaaactgttttggtgacgtacgtggacaattacaagctagacacaatgccaagatatatcggcaaaaagaagactcgagaagaccgggcacgagaggcctcctatctcagtaaatgagaatgagaagtacaagaacgnctaaagactatgtgaaactncctgaaggncnggtaanganatggnagcgtccgacgctgtgctnatntanaanccgggggggcggtc

SEQ ID NO: 6049 - DNA, 265 bp, Zea mays
  misc_feature: Incyte ID No: 700458262H1
  unsure 214, 262: a, t, c, g, or other
acgaggtggcctccgaactgaaatcaagagggctacgtgttgaagtctgtccatggagagcgcctaccaaagctaataaggaatgctgaaacacaaaaggtgccactcatggcagttgttggtcctaaagaagttcaagccaggaccctgactatgcaggtccaggcacaacggggagatcggcacgatgcccgtcgatgattcatcaccaggnttcaattgctgtcgcaaacaaatcatcactatagatccgttggtccgncaa

SEQ ID NO: 6050 - DNA, 68 bp, Zea mays
  misc_feature: Incyte ID No: 700458263H1
  unsure 3, 20, 29, 44, 62: a, t, c, g, or other
atnaacactgacagtgtcanaaataattntctccattagcgcangtacaacgaatattccanacaacc

SEQ ID NO: 6051 - DNA, 258 bp, Zea mays
  misc_feature: Incyte ID No: 700458270H1
  unsure 45, 84, 101, 107, 125, 136, 160, 206, 224, 231, 245: a, t, c, g, or other
cgcgtcgaccttgtcgtcgatgttggcttgcaaggcgagcccganccggccgtgcgtcgtcctccttgtttgcctgctggtggnggtggccgcagtccgtncgtcgntcgctggctcggcgccgncgcagaggcancgttcgacgacaactacgtggcgnatggggtagagatggttatcaccttgtcgtccggggcacggaggcnaatgtcaccatggaccanagctctngtgccgggttccgntccaagtgtacgt

SEQ ID NO: 6052 - DNA, 169 bp, Zea mays
  misc_feature: Incyte ID No: 700458273H1
  unsure 9, 16, 19, 70, 92, 98-99, 106-107, 110-111, 115, 120, 127, 130, 132,161, 168: a, t, c, g, or other
cagcctccnaagccantcncaaacccccgcttccagaaccttcttcgaagctccccgacgtactacctcnactcgcaccgatggtgaagganccaatnncgcgtgnnggnnattngcgcngcagganaantnggatatcccctggttcccatgattgctanaggtgtna

SEQ ID NO: 6053 - DNA, 185 bp, Zea mays
  misc_feature: Incyte ID No: 700458274H1
  unsure 19-20, 32-33, 46, 64, 68, 77, 80, 83, 96, 113, 122, 124, 138, 141, 149,153, 155, 158, 179, 184: a, t, c, g, or other
ccctaacccctagccagcnntccgccgccatnncgccggcgagatngcgttgtacctgctgttncgantcggcctcnggntanggcctattccatncgtacggtatcgatggnatcgggaanancgttgaggccgtgnggncctccgtnctgnanctngaccgtctcggaaaggcgctnagatna

SEQ ID NO: 6054 - DNA, 267 bp, Zea mays
  misc_feature: Incyte ID No: 700458277H1
  unsure 11, 29, 65, 119, 126, 163, 213, 264: a, t, c, g, or other
gcgcgtcaggnagcgctgggacgacctcntcgacaagctcatcgacgaccatgcggccaggatgnaaacccatcaggaacgaggacgacgataaggacttcatatacgtcttggctgtnctcttcngaaggagtatggcctcaccagagaccatatcaagggntatcttgatagatcatgttcgaggccggtaaccgacactacgttaacatnacgttgggagttcgccatgaacggagctcatacggaagccacacctggtgnaag

SEQ ID NO: 6055 - DNA, 263 bp, Zea mays
  misc_feature: Incyte ID No: 700458278H1
  unsure 2, 38, 56, 122, 184, 239, 256-257: a, t, c, g, or other
tntacaatgtagtggacttcagctggtctcccactgancctatcatatctctgttncgtgcctgaactgggtggtggaaatcagcctggcgagggtgagtctagtgcaaatccctggcaaanaggagctgcgacagaaaaaccttttccagtgtcagtgattgtaagatgtattgggcaaaacngtggagaatatcttgctgttccaagttgatagatacacaaaaacaaaaaagagcncctacactgggtttganntcttta

SEQ ID NO: 6056 - DNA, 257 bp, Zea mays
  misc_feature: Incyte ID No: 700458282H1
  unsure 53, 114, 155, 169-170, 238: a, t, c, g, or other
ctttggatgatcagctcccaagaaatgatggcataacaactacggtggtgaanctctaatggcaccaaccttcatctatgttaagcaggtgcttgagatattagcaaaggtggngtgaaaggactagcccacatcactggtggtggcttactganaatatcccaagagnnattcccctccggatgcggggcaaaaattttatgggtcatgggaaatacctccaatcttcagttgcctncaacagctggaaacattga

SEQ ID NO: 6057 - DNA, 70 bp, Zea mays
  misc_feature: Incyte ID No: 700458283H1
gtgattggaggtgtttgtcgcttttgtaataattataatgcaggatggcatgttgcataaattgctcccc

SEQ ID NO: 6058 - DNA, 254 bp, Zea mays
  misc_feature: Incyte ID No: 700458285H1
  unsure 167-186, 231, 252: a, t, c, g, or other
cgaggttctcgtctacaaggtttatgtcgatgaagatgcctccatatccatcatagaaaggagggcgagcctgaaggaattctacactatcatataccctttcttgcaacaactggaggacaacttgatggacaaggactgcaaggacaaagggtggtctgctgctnnnnnnnnnnnnnnnnnnnnttcggaagcttgttgccgaagatgacagggaggatgaatgtggcnttgcctggagactgcaccaanat

SEQ ID NO: 6059 - DNA, 250 bp, Zea mays
  misc_feature: Incyte ID No: 700458286H1
  unsure 7, 27, 29, 73, 79, 86, 99, 155, 200-201, 209, 213, 228-229, 237, 240: a, t, c, g, or other
ggtaganaaagatgtgactcttgggtngnctgcatacagcacacttgcttctatctatgtaaatgctggacantttggnaaagcanaatctgctctgangaaacttgagggccttatcagtgctcatgatgacagacagcctttgatttccttcngagcctatacgcttcactaggaaatttgagcgaggtcaatagggnntggaatgngatnaagtccaaattcgcnngggtaacnaanacaagtactt

SEQ ID NO: 6060 - DNA, 122 bp, Zea mays
  misc_feature: Incyte ID No: 700458287H1
  unsure 4, 9, 21, 53, 59, 73, 85, 89, 93, 97: a, t, c, g, or other
ctcntattngtaactcgctgncggcacgaaagttggtgtgtgttttagcagantgcttnactgtccgtgaaantaaacttgaaantgcntatnacgnctgaaatgatattgtcgttcccccc

SEQ ID NO: 6061 - DNA, 140 bp, Zea mays
  misc_feature: Incyte ID No: 700458289H1
  unsure 10, 14, 18, 23, 48, 55, 60-61, 70, 88, 94, 102, 106, 114, 129: a, t, c, g, or other
tgtcaacccnacanaggnatgcncataaggaaaggttaaaaaaagtanaaggaantcggnnaatcttacnccgcctgtttaccataancatcanctctagcntcancagtattngaggcaccgcctgcncagtgacacat

SEQ ID NO: 6062 - DNA, 138 bp, Zea mays
  misc_feature: Incyte ID No: 700458292H1
  unsure 2, 11, 102, 111, 114: a, t, c, g, or other
anaggatttgnggccatacccgaaaacttgttaccttgagttcaagggccatatgagtcctgtgaaatccatttcggtcgaaattacagggcagtggcttgnatctggttnctngtgcatggtacaattctgtctggg

SEQ ID NO: 6063 - DNA, 273 bp, Zea mays
  misc_feature: Incyte ID No: 700458296H1
  unsure 249: a, t, c, g, or other
gttggatagaagttggcaataaagtttatacatttacagcagaaaacagatcaaagaaccaggtaaacaatgtcctggttgttcttgattgcttgcagtcacatatggatcacgagtatgatatactactgatcgagggtctggattgggattatcctgagcatatcaagttaagtttaaacactatataaatttgaagatgattgctcgttatgttccagttcatttgaagaggcactcaataggaantgacatcacacctcaaatatctgc

SEQ ID NO: 6064 - DNA, 275 bp, Zea mays
  misc_feature: Incyte ID No: 700458301H1
  unsure 6, 27, 140, 190, 232, 248, 270: a, t, c, g, or other
ccagancattacaaagatttcacaganaggttaactggaacagaagatacggtacgagcagcctcaaagcgactaactcaggggatggcagatttcaacaaggcaatatcttcagcaaaaactgacgaggaaaagactanaattaaaggcgatcagcaaacttcaacaaggacaatgaggtcatataacntatattggcaatgacacgtcattgcattaaaaatcccctttnttaaccggtgataagnaaatcactcgtcatggtggagnagccc

SEQ ID NO: 6065 - DNA, 270 bp, Zea mays
  misc_feature: Incyte ID No: 700458303H1
  unsure 39, 45, 195: a, t, c, g, or other
taccctgccatcgtcctcgtcaacaaagccactggagangctacncaagcattcccttggccagtccacaccctgttcttctgacccgccataatccagactccctggacgagtctgtcctgtggacagagagcagggacgttggggatgggttccgctgcattaggatggtcaacaacatctacctgaactttnatgctttacatggagacaaggaccatggtggtgtgcgcgacgggacggcccttgtgctgtgggagtggtgcgagg

SEQ ID NO: 6066 - DNA, 264 bp, Zea mays
  misc_feature: Incyte ID No: 700458304H1
  unsure 60, 66, 73, 115-147: a, t, c, g, or other
acgaaaaccctaaaccctcgctacccggcggcggctacaagctcttcgtcggttcagcancatgangccaccngctagaggaggacgtggtgggaggggtggcaggttcgatggnnnnnnnnnnnnnnnnnnnnnnnnnnnnnnnnngtttggcgttggtagaggcgggagaggggacaggggagggagaggtggcaggactcccagaggcggccgtggcggcggtggcaggggtggccgcggcggtggcatgaagggcgggag

SEQ ID NO: 6067 - DNA, 71 bp, Zea mays
  misc_feature: Incyte ID No: 700458305H1
tttggttcatatatttgtacatgtaatgggtaacggataacgtttaaatccatcgtttgttttagtcccaa

SEQ ID NO: 6068 - DNA, 261 bp, Zea mays
  misc_feature: Incyte ID No: 700458309H1
  unsure 15: a, t, c, g, or other
gcagcgccgcctggntcgagcagccgagcgactaagcgaagactcccttttccccgagcacaagagaaccatggcggcggcggcagtttacggcggcttcaaagggaagcttggcgtcgaggatgcccccgagctgcagctcaaccgcatccgcatcacactctcatccaagaacgtcaagaacttggagaaagtttgtgcggatttggtaaagggagccaaggacaagcatttgagggttaagggacctgtccggatccc

SEQ ID NO: 6069 - DNA, 260 bp, Zea mays
  misc_feature: Incyte ID No: 700458310H1
  unsure 72, 87, 124: a, t, c, g, or other
atggccctcctggaacaggaaagtcttacttggcaaaagccgtgcgcaaccgaggctgattcaacatttttncagtatatgcttctncagatctggtttcaaagtggatgggtgaaagcgaganattagtcgcaaatcttttccaaatggctcgtgaaaatgccccttccattatctttattgatgaaattgattctttatgcggtcaacgtggagaaggtaatgaaagtgaagcatctaggaggattaagactgaactt

SEQ ID NO: 6070 - DNA, 257 bp, Zea mays
  misc_feature: Incyte ID No: 700458311H1
  unsure 214: a, t, c, g, or other
cattttctcaataccttgaacaactaagcaagtccaatgtctcatgcccagccccttcgtttacaggcccagtggaaacacgtcgatattcaggataaccaagccaatgctatgaaggaaccaggaaccagtggtgggtatggctccccaatgaaagatgacaagaacaaggatgtggatacaatagcttcgaacttcatcaagcttaagcaangggcttgggcactccagaagagcacaaccatgtaccaaccttc

SEQ ID NO: 6071 - DNA, 87 bp, Zea mays
  misc_feature: Incyte ID No: 700458312H1
tttagttaattatcacaagtgacagtagaaaggaacagattgtgatgaggttgaatggatgaataaatcgctagtccgccccgaaaa

SEQ ID NO: 6072 - DNA, 253 bp, Zea mays
  misc_feature: Incyte ID No: 700458313H1
  unsure 95: a, t, c, g, or other
cattgccttgaggtcgtcgattagaaacgattttgttgaaggtgtgcgtgctgttttagttgaacaaggaccagaatccgaagtggaatccagcnactctggaagaagtaaacatggccgaggtggaatcagttttcgagccattaggggccgaggctgagttgagtgtgtgaaatatggcctgccacactcagttttcttatttgtgctgcaataataatgtatacaaaacagaaatgcgatgcccacagaa

SEQ ID NO: 6073 - DNA, 260 bp, Zea mays
  misc_feature: Incyte ID No: 700458314H1
  unsure 6: a, t, c, g, or other
cgaganggcaggagcagccgcagtcccggcgatcccgccgccggtacgccctcacacctcctgcgtcactggccttgcgtttctctttccaacaatcaagatgagccgtggcggtagcgcgggtggtggtcaaagttctctgggttacctctttggaagcggtgagccccccaaaccagcagtggcaccaccagctgtaagtgctccacctgctgctgcaggtgctccacctgctgagaaaccacctgctgcaaagcctg

SEQ ID NO: 6074 - DNA, 258 bp, Zea mays
  misc_feature: Incyte ID No: 700458315H1
  unsure 31, 49: a, t, c, g, or other
agcagcatagggaactcatcataaacgaganatgtcttggtcttgatcntccggacacagcccacagttatggtaacatggccttgttctatcatgggctcaatcaaactgaattggcactgcggcacatgtcccgtacactgctgctgctaagtttggcgtcaggacctgatcatccagatgttgcagcaactctcataaatgttgcaatgatgtaccaggatgccagtaatatgaatactgctcttaggtatcttc

SEQ ID NO: 6075 - DNA, 75 bp, Zea mays
  misc_feature: Incyte ID No: 700458319H1
  unsure 33, 36, 44: a, t, c, g, or other
tgcgaggaagcgatccgccgaacgccaggcttnctncccaggancaattacgccctcaagtggaacctttccagc

SEQ ID NO: 6076 - DNA, 264 bp, Zea mays
  misc_feature: Incyte ID No: 700458320H1
  unsure 35, 46, 180, 249: a, t, c, g, or other
catcctccgccgcctccgtctctgcttccctaganccgtcgcgatngcagcagcccctgccggttgcccctgcaatcaccgcatcctcctcctttgtttcttcgtctccgttctgtctcaaggcatcgatgaccagccagcgccgacccgcggggagagtctccatcgtcatccgctgcntcagtagcccgccggccgtcgacacatctttcaagactaatgtcccgcgcaatgctaatatggccaaantccaagcaggatatt

SEQ ID NO: 6077 - DNA, 260 bp, Zea mays
  misc_feature: Incyte ID No: 700458321H1
ccactcgctgcagttaaatactcccgtggaacgttcatattccctgaagcacagccttccccacacaagaacttcgctgacgaggttgccttcctgaatcgcttcttcggtggcctcaagtccggtggcaatgcttatgtgattggtgactctgcgaacccgggcagaagtggcacgtctactacgccgctgagcaccctgaggagcctgttgttactctagagatgtgcatgactgggctggacaagaagaaagcttct

SEQ ID NO: 6078 - DNA, 257 bp, Zea mays
  misc_feature: Incyte ID No: 700458322H1
aaatttgagactcagttacgtgactttgtggtgaagaacacgattcatgaccgtgtccattttgtgaacaagacattggcagtggccccttacttggcagcaattgatgtgcttgttcagaattctcagggccgtggagaatgctttggaaggataacaattgaagcaatggcattcaagttgccagtattgggcacggctgctggagggaccacggagatcgtcctggacggctcgactggccttctgcatcctgc

SEQ ID NO: 6079 - DNA, 260 bp, Zea mays
  misc_feature: Incyte ID No: 700458324H1
caagggcattgaagactgcgtgagggcaggttgctatgccgcaaacgttatcatccagcgcccgggctgtacttacccggagaagcctgacttcaactagtgcaaaaactgaggcacgtcatgagagggactgttataggcacacttaattgttaaccagtgcgtggttcggtgtctacacaccctgtattcttccgaggcttctcttctgatccggccaatatttttgccgtgaaatttgtgttctgcgactatggacg

SEQ ID NO: 6080 - DNA, 250 bp, Zea mays
  misc_feature: Incyte ID No: 700458330H1
  unsure 96: a, t, c, g, or other
gacaacaagttggttggacgggaagcatgtggtgtttggcaaggtgttgtctggaatggatgttgtgtacaaggtcgaagctgaaggccggcagantggggagccgaagagcaaggttgtgatagcagatagcggcgagctgccgatgtgacggcgagctgaacttatgttccatcccgaagcatgatgataagaatttgctggtggccgtctgtcgttctagaatgttaggccctgtttggaatcttag

SEQ ID NO: 6081 - DNA, 241 bp, Zea mays
  misc_feature: Incyte ID No: 700458336H1
  unsure 25, 41-42, 61: a, t, c, g, or other
ctgatggctcattggtagcagtacnaaagactaaaagaganngcgtacacctggtggtgancttcagttccaaacagaggttgagatgattagcatggcggtgcacaagaaccttctccgacttcgtggtttctgcatgacacctactgaaaggttgttagtctacccatacatggctaacgggagtgtggcatcacgtttacgagagcggcagccatctgagccacctcttagctgggaa

SEQ ID NO: 6082 - DNA, 262 bp, Zea mays
  misc_feature: Incyte ID No: 700458337H1
  unsure 3: a, t, c, g, or other
agncgtgacgcgcgcaggacgtggacgtggcgtggttccggaacccgctggtgcacatcacgatggcggcggacatcacgacgtcgagcgacttctacttcggcaacccggacgacctgggcaacttccccaacacgggcttcatctacttcaaggcgacgccccggaacgcccgcgccatggcctactggcatgcggcgcggcggcggttcccggagaaccacgatcagttcgtgttcaacgagatcaagcgggagtcgcg

SEQ ID NO: 6083 - DNA, 259 bp, Zea mays
  misc_feature: Incyte ID No: 700458338H1
  unsure 21, 89, 193, 215, 221-222: a, t, c, g, or other
aaggcggcatcatgagctctnccagtcagtagataagccgtaacctgcgcgattctattcttgcgacggaagcaaaatctgcacgaganacagacgacgagatggccgatgcggaggacgccgccgccgcgcgccgacgggccgccataaccgactaccgcaagaagctgctcaactgcagggagctcgagtngcgcgtcggcaccgtgagatanagcctnnaaaatgcaaagagggattttaccaagactgaagacga

SEQ ID NO: 6084 - DNA, 256 bp, Zea mays
  misc_feature: Incyte ID No: 700458339H1
  unsure 32: a, t, c, g, or other
acacagcagcctttttgttctccccgcgagcnctctctttctctatcgactggcgacgactccgccaccgccgccgctctacgcgagacgcccaggtcttcgccaacgacgagcatccgggttagagaggaagaaattgcaaccgaaacaatggcggcagattccggcgctcgcagacaaccaagcttcaccaaggtcgaccagctgcgccctggaacccacggccacaacctcatcctcaaggttgttgactcca

SEQ ID NO: 6085 - DNA, 254 bp, Zea mays
  misc_feature: Incyte ID No: 700458341H1
  unsure 133-134, 152: a, t, c, g, or other
ggtgagcaatacgtgaatagttcaacactttcagatgttacctttcttggtagaaggaaagcgcttttatgcacacagaattgctttgcttgcttcttcggatgcatttcgtgcaatgtttgatggtgggtanngggaaaaggatgcaaganacattgaaattccaaatatcagatgggaggtctttgaactcatgatgagatttatctatacagggtcagtgcagattaacagtgaaatttcacaggatcttc

SEQ ID NO: 6086 - DNA, 247 bp, Zea mays
  misc_feature: Incyte ID No: 700458345H1
  unsure 45: a, t, c, g, or other
gcacgccgcggcatgctggcctacgtggagaggatccagagggangagaggatcaacggcgtggagacgctggagcatcagaagtggtcgggcgccaatttctacgacagggtgctcaaggctgtgcagggtggcatctcctcgactgcagccatgggcaaaggagttactgaagagcagttcaaggatccacggcccgcaactgggagcagtggcctgcaattatggccaaatccaggatttgatg

SEQ ID NO: 6087 - DNA, 250 bp, Zea mays
  misc_feature: Incyte ID No: 700458346H1
  unsure 214-217: a, t, c, g, or other
gccgccgccgctataatggaggcaatggaggctgagctcgaccttgccgtctgcattacagaaggaatacctcagcatgacatggtgaaagtgaaggctgcactaaacagccagtctaaaactcgattgattgggccaaattgccctggtatcattaagcctggtgagtgtaaaattggaatcatgccaggttacatccacaagcctgggcgtnnnnagaccccgtatctcgttctggtactttgacata

SEQ ID NO: 6088 - DNA, 264 bp, Zea mays
  misc_feature: Incyte ID No: 700458348H1
tagttccttgtcatgcccttgagcacgttgatcttccagttcatcatggtgcagtttctaggagagttcgccaacacgacgcccctgaccatacaccagtggctagccagcgtgctcctcggtctggccgggatgcccatcgccgccgccgtcaagctgatcccagtcggctcgtcgtgataccattgaagattgctgctgcctgggatgggaagcacggcatgaaaagcgtcaggctgtccaagctgcatggtattcggtgga

SEQ ID NO: 6089 - DNA, 263 bp, Zea mays
  misc_feature: Incyte ID No: 700458349H1
  unsure 23, 25, 29, 46, 188: a, t, c, g, or other
gagctcctgtcggattcattcancnaacnaggagctcgagaacggngtcctgtgggaggtcgagggaaagtgggtcacccaaggtcctgttgatgtagacattggtgccaatccatccgccgagggtggtgaggacgaaagcgttgatgacacagccgtgaaggtggttgatattgttgacacattcncgctacaggagcaacctccttttgacaagaaatcatttgtctcttacattaaaaaatacatcaagaatctcactg

SEQ ID NO: 6090 - DNA, 262 bp, Zea mays
  misc_feature: Incyte ID No: 700458350H1
tggtttcattagctgctcctgccaagaagggtgatgccaagacccaggccttgaaggttgccaaggctgtgaagtctggggcagccaagaagaagaccaagaagatccgcacgtctgtgacatttcaccgccccacgaccctgaagaaggctagggaccccaagtacccacgaatcagcactaccggaaggaacaagcttgatcagtaccaaattctcaagtacccccttaccacagaatcagcgatgaagaagattgaaga

SEQ ID NO: 6091 - DNA, 258 bp, Zea mays
  misc_feature: Incyte ID No: 700458352H1
  unsure 43: a, t, c, g, or other
agctcctgtcggattcattcacctacaaggagctcgagaacgncgtcctgtgggaggtcgagggaaagtgggtcacccaaggtcctgttgatgtagacattggtgccaatccatccgccgagggtggtgaggacgaaagcgttgatgacacagccgtgaaggtggttgatattgttgacacattccgtctacaggagcaacctccttttgacaagaaatcatttgtctcttacattaaaaaatacatcaagaatctca

SEQ ID NO: 6092 - DNA, 212 bp, Zea mays
  misc_feature: Incyte ID No: 700458353H1
  unsure 22-23, 32, 40, 54: a, t, c, g, or other
tgccgtctcccttttgcgtgannaagaaaganagcgagangcagtcgccatgtnctggcatcatccacaagatcgaggagaagctccacatggggggcgaccacaagaataaggaggaggagcaccacaagaaggccgaggagcaccacaagaaggaggagggggagcaccacaagaaggacggcggggagcacaaggaaggcatcgtggag

SEQ ID NO: 6093 - DNA, 256 bp, Zea mays
  misc_feature: Incyte ID No: 700458356H1
  unsure 48, 50, 61, 75-76, 131, 143, 170, 200, 203, 227, 255: a, t, c, g, or other
ccgcgtcgcgtgcgcatcctacgatccaaagctctctctgctcgcagncntggcgaagaantacccgaccgtganngccgagtacagcgaggctgtggagaaggccaggcgcaagtccgagccctcatcgncgagaagagctncgccccgatcatgctccgcctcgcgtngcactccgcgggacgttcgacgtgtcgtcngangaccggcgtcattccggcacgatnaagcatcagtcggaaattggctcacggng

SEQ ID NO: 6094 - DNA, 250 bp, Zea mays
  misc_feature: Incyte ID No: 700458360H1
  unsure 2, 65: a, t, c, g, or other
gnccgcagagggagaggaggctcggtgacaggtacctggccggcgacaacgaggacctgccggantccgtcgactggcgggccaagggcgccgtcgcggagatcaaggaccagggcagctgcgggagttgctgggctttctcaacaatagcggctgtggaaggcatcaaccagattgttactggcgacatgatctccttgtctgagcaggagcttgttgactgtgacacttcatacaaccaggggtgcaa

SEQ ID NO: 6095 - DNA, 132 bp, Zea mays
  misc_feature: Incyte ID No: 700458362H1
  unsure 5, 33, 55, 124, 127: a, t, c, g, or other
gagantaaactcaactgcgaccttgagcaaganaacttttgctatattgcatganggacagattgagaataaaactagtttttggcgaacgaactattgtattttattgtacaatttagtatcnatntatgg

SEQ ID NO: 6096 - DNA, 268 bp, Zea mays
  misc_feature: Incyte ID No: 700458367H1
  unsure 72, 84: a, t, c, g, or other
aagaatagaaagcttttttttggggtgaagccatgatgctggaagggaagtcctaccttgttccgcgctccntgctgagctccngcgagacggagacgcagtgggcgtacctcgctcacgaggtcctcggcggcaagcgcccggcgccggaagacgtcgaggtcgaagactggacgaagctgacggcggcggtaagcgcagaagccgccgtctccgcagccgcacacgccggacatctccgagggtcgcggctccagccgccatgcct

SEQ ID NO: 6097 - DNA, 263 bp, Zea mays
  misc_feature: Incyte ID No: 700458370H1
aaacatcatgttgtttcttcaatcagagctagatgcattccacgtgacagtttggatgaacacattgttatccacatggatggtgtaaatattttggcagtcaattatggctctgttgatgggtgccaataccctaggcctatgaaattgccatcaaaatggacattcagctcttacactatcctaaagactgctgaacaggcaccaagaaccccatcgtttgcagatcagttaatagaagctgacaatggtcttggcgaagt

SEQ ID NO: 6098 - DNA, 117 bp, Zea mays
  misc_feature: Incyte ID No: 700458371H1
  unsure 15, 20, 27, 38, 71, 75, 83, 101, 111: a, t, c, g, or other
ggacataattacaantctgngtctcanatgacagatgngtgagcacaatttttcctgtatatttgcatttntgcntgtgcaanaatgctctgtgctattantgatgtgtanataatc

SEQ ID NO: 6099 - DNA, 250 bp, Zea mays
  misc_feature: Incyte ID No: 700458373H1
  unsure 7, 10, 13, 15, 20, 26, 44, 96-119, 124, 136, 156, 234, 245: a, t, c, g, or other
tcgagcngancancncctgnccacanatccgatccgtagccgcngtgcctcgctttcgtcttttcccctgctgctcgagtacgagcggctactccnnnnnnnnnnnnnnnnnnnnnnnntgaanatcaccaacgtngcggtgctggataaccccancgccttcctcaatcccttccagtttgagatctcctacgagtgcctcgtgcccctcgacgacgatctggagtggaagcnccggggccctngatca

SEQ ID NO: 6100 - DNA, 249 bp, Zea mays
  misc_feature: Incyte ID No: 700458374H1
  unsure 9, 150, 180-181, 183, 185, 188: a, t, c, g, or other
ggcaagtgngcggcgccgtccacgccgtcgtccacgaccacgaggcggcgctgcggttcaagggcaccaaggccaagctcaacttcccggagcgcgtgcagggccgaaccgacctcggcttcgtcgtcacccgcggcatcccggaccacnaccggcacccgcgggcggcggcggtgaacnngncnacncatggccgtacggtggggagcaccacaggaataaaaaggacgcgtgatcgtccagctggcc

SEQ ID NO: 6101 - DNA, 248 bp, Zea mays
  misc_feature: Incyte ID No: 700458375H1
  unsure 22, 26, 30, 33, 95, 98, 104-105, 107-108, 111, 129, 133, 186: a, t, c, g, or other
ctcgaaggcgtatgtgcaaganatgnctgncgncggatgctagtgacattgatgaacttgttacgggcgtgctggcgaccgtcatcgaaccggcntgnagacannannagngatgttaccggtaggcangatngacttctatggtacaaggacgccgggcagcatgtcaacggggagttttccatngctgttgttcaggccaataacttacttgaggaccagtgtcagattgagtcgggcccactgag

SEQ ID NO: 6102 - DNA, 247 bp, Zea mays
  misc_feature: Incyte ID No: 700458376H1
  unsure 2, 242: a, t, c, g, or other
anatgatggccttgatgatgaggttgatgatgacgctgatgaggaccatgaggataaagcagatgatgctgtccctgctgaaccaaccgcgaagaatgcgacagctccacctgcaccacccaaagatactgaaagacaactttccaagaaggaattgaagaaaaaggaactcgctgaacttgatgctgttctggctgagttgggccttggcacatcaaacaattccatacaagaggaacccnatggt

SEQ ID NO: 6103 - DNA, 247 bp, Zea mays
  misc_feature: Incyte ID No: 700458378H1
  unsure 128, 189: a, t, c, g, or other
aaacaatcaaccagcaacactcttctcgtataacataatacagcgaaggtaactgcacatggcaacttccatgggttgtctcgtcttgctctgccttgtttcttctctccttcccagtgccgtccttngccacccatggggtggcttgttcccacagttctatgaccattcgtgccccaaggcgaaggncattgtgcagtccattgtggcacaggctgtggccaaggagaccaggatggcggcatct

SEQ ID NO: 6104 - DNA, 251 bp, Zea mays
  misc_feature: Incyte ID No: 700458379H1
  unsure 38, 187: a, t, c, g, or other
tacgatcaacttgaaccttataggccttcatggtctcngaattcaggatactatcaggcctgcacagaagggataactccagaatatgacaatcatacactggcatctgatgaaaactgggatatgtcaagcttatttatgtctccattctatcctcaagaaacacgatcttatgagcagtctcatngtgatgaaaatgtctaaattggaagagcaactggaacatgctttctgaagataatcatcagata

SEQ ID NO: 6105 - DNA, 276 bp, Zea mays
  misc_feature: Incyte ID No: 700458381H1
  unsure 108, 124: a, t, c, g, or other
gtcggctagtttggacgcatggctgctgcaggagagtagagaccacagcgcgcgaggcgaggagaataagctatgggcgcgccgaagcagaaatggacgtcggaagangaggatgcgctccgcnccggcgtgcgcaagcacgcgccggcaaatggcggaccatccagaaggaccccgagttcagcccggtcctctcctcccgctccaacatcgacctcaaggacaaatggaggaatttaagtttcagtgcaagtggactgggatcaagtaaactgc

SEQ ID NO: 6106 - DNA, 271 bp, Zea mays
  misc_feature: Incyte ID No: 700458383H1
tgagtgcaagaacgaggccctatgccacgcctgcaacaagacaggtcacttggcacgtgactgccctacttcaggtgctaacgtcaagctatgcaacaaatgctttaaatcaggccacatcgccgttgactgcaccaacgaacgggcctgcaacaactgccgtcagccagggcacatagctcgggagtgcaagaacgatccggtctgcaacctgtgcaatgtctccggccacgtcgcacgcgtctgcccaaagacgactctggcttcagtg

SEQ ID NO: 6107 - DNA, 270 bp, Zea mays
  misc_feature: Incyte ID No: 700458384H1
  unsure 28, 150, 189, 268: a, t, c, g, or other
tcccgtcgcatcccatcccactaccacncatctcgtcgtccgccgattcgatccggttcttccaacccaggggctgtgatggcgacgaagaggagcgtgggcaccctcggcgaggcggatctgaaggggaagaaggtgttcgtgcgcgcngacctcaacgtccctctcgacgacgcccagaagatcacngacgacacccgcatccgcgcctccgtccccaccatcaagttcctcctcgagaagggcgccaaggtcatcctcgccagcnac

SEQ ID NO: 6108 - DNA, 245 bp, Zea mays
  misc_feature: Incyte ID No: 700458390H1
  unsure 69: a, t, c, g, or other
gatcgatcgcttcctccatcgaggcggtaaagcgccgcccagatcgccggaagcaagcggcgacctcancagctccgagcagcagcagggaggctcgtggaaccattagtcgttttctggcagcggcatggaggggctgagctggagaacggtgtgttgtttatcggtgctctgtgccgtgctgttcttgcgcccggccgagggcatccgcttcgtgatcgatagggaagagtgcttctcgcata

SEQ ID NO: 6109 - DNA, 253 bp, Zea mays
  misc_feature: Incyte ID No: 700458391H1
  unsure 3, 43, 53, 82, 95, 114, 121, 153, 160-161, 173, 203-204: a, t, c, g, or other
ganatcctctcaggcatcacctcagcccccgaaggtagaaacnccagttccanaggtggttttacctcctcagtcatagaantcccccgccaaanttgatgcaacaccgcctanagttganaatccatcggttacaccacctcctaaagttgnttatgcnnctgatctctttnacatgttgtcaatggatggaacaacagagnnagagtcagcgtcatcttcaaacgacgataatgggctgggatggcttcca

SEQ ID NO: 6110 - DNA, 244 bp, Zea mays
  misc_feature: Incyte ID No: 700458393H1
  unsure 155, 183, 193, 195, 197, 202: a, t, c, g, or other
ccgccgctcctcaagccccaagctccggcgatatgtcacgcttcggtcgatccggtccgccgccgccgatccgcgacacatattcactcctcgtcctcaacatcaccttccgcacgactgctgatgacctcttcccgctcttcgacaagtacggngagattgtcgacatctacatcccaaggnaccgcaggantngngactngcgcggattcgcgttcgtgaggtacaagtacgaggacgaggc

SEQ ID NO: 6111 - DNA, 253 bp, Zea mays
  misc_feature: Incyte ID No: 700458395H1
cagacaaccagctgtttgttgcaacatgcggcccagctcgagataccagtgcaggatatgttgcttggggacactccactcttgttggaccttttggagaggtgattgcaacaactgagcatgaggaggcaactataatagcagaaattgactactcactgattgagcagaggaggcaatttcttcctctgcaacaccaacgccgtggcgatctctatcagctggttgatgtccagaggctgggttctcatta

SEQ ID NO: 6112 - DNA, 267 bp, Zea mays
  misc_feature: Incyte ID No: 700458396H1
  unsure 5-6, 11-12, 22, 56, 106, 199-200: a, t, c, g, or other
atcanntgagnntgctttgggngatccatttcatgttgacatcaccaaactcactntaggctacctcgatgacgctgagatggaggttgtcgatgttctttcctcnaaaggtgtcaagctggtccccttcaagctgaactacactgtggaatcagtccagtccatcctgaacataacgatggacactgatatgctttcnncacttcgataactggcagcgggaaggacatgatgatgactatgaggcgcaagaccagtggccggtag

SEQ ID NO: 6113 - DNA, 292 bp, Zea mays
  misc_feature: Incyte ID No: 700458402H1
  unsure 41, 188, 197, 205, 208-209, 226, 228, 257, 266, 269, 271, 278-279, 287,290: a, t, c, g, or other
cagtttcaaaagcaagttgaggagcaatatctctcaaatgnggagaggcaattggagaggatccagaatgcccggaacgctcggaaggcgaacgggcctggtaacatgcaagaaatggacaaggagctggacacccacagggcggagcatggtccaaagcctcggcgagttcccgaggagggcgcaancatgactangaaatgcnagnncatttcttcggaagacnanctgatggatgaatttttggcattcacgancattcatgnggncnttccaannctccgaanaantt

SEQ ID NO: 6114 - DNA, 290 bp, Zea mays
  misc_feature: Incyte ID No: 700458404H1
  unsure 43, 238, 278, 284, 289: a, t, c, g, or other
tgatggacatcggcatgatgaccatgacaaaaggacggcaganagatgaaaaagaatggagcgagctcttcaccaaagcaggggtcagcgaatacaagatcctgaaggaatttggagctcgtgttgccttcgaagtctatccgtgagattgcacctggactatacatatatatttacatacatatatgtatgtgtgtgggtgccttgcgtggcttggcgtgatgatgtcataaataangagggtgggtgtgcttgcggtattcatggatggccaggantgagcncatgnc

SEQ ID NO: 6115 - DNA, 295 bp, Zea mays
  misc_feature: Incyte ID No: 700458407H1
  unsure 73, 78, 203: a, t, c, g, or other
gggctgaatggtcctcgcgcgagccatggtgatggagcacaggaagaagtcgaattatcttgttgccctcgtnttggnttcgctcttgctctccgccatggcaggagggcatcggaagaagcttctgaacaaagacgacgcatcagaatcaatggagacattggaatccacgcagcagctgcaggaagacgacgaaatggctntggtggtccacgagagaattctcaggcaggcgaagatgaacgactacgggagctacgactcttcgccggaccatggctaagcctcacttcaa

SEQ ID NO: 6116 - DNA, 293 bp, Zea mays
  misc_feature: Incyte ID No: 700458410H1
  unsure 165, 190, 196, 203, 292: a, t, c, g, or other
gtctcgggcgctcggctccgtcctcccccacatccacctgcccgtttctcgctccgaagcttctcctctcgcgtctcgtaccaggtcaggagggagggagggagacgggagaaccagggagcggaggcgtgcgtgctgcggcctgcggcctgcaggaccagaganccggggactgagctagggtctgggntgggangcggagntgtcgacgccggcgaggaagcgcctgatgcgggacttcaagcggttgcagcaggacccgcccgccggcatcagcggcgcgccgcacgana

SEQ ID NO: 6117 - DNA, 195 bp, Zea mays
  misc_feature: Incyte ID No: 700458413H1
  unsure 10, 42, 51, 115, 180: a, t, c, g, or other
gtccaacagnctctccgtaaggacgtaaggtaagacagccangggtcagtnagtgagtactgactgagtagcccgaagcttcagagcaagcgggtgccaactgccaaggggggtnatggcgctgtctcgaacgcatggcggctcccgtcctcgtcctcctgctcctcctcgtcgccacanagggggggacgacca

SEQ ID NO: 6118 - DNA, 295 bp, Zea mays
  misc_feature: Incyte ID No: 700458415H1
  unsure 18, 73, 82, 200, 274: a, t, c, g, or other
gcttcccagagacccagncatggcgatctcccagatctcacgcatattcctggccatccttctcctggccgcngccttcgcngccgccccagctgcgcttgcggacggcgacgacgtggtggcccttaccgaatccacgttcgagaaggaggtcggaaaggaccgcggcgccctcgtcgagttctacgccccctggtgtngtcactgcaagaagcttgctcctgagtatgaaagacttagtgcaagttttaagaaagctaaatctgtcttgatngctaaggtgattgtgatgagc

SEQ ID NO: 6119 - DNA, 140 bp, Zea mays
  misc_feature: Incyte ID No: 700458416H1
  unsure 75: a, t, c, g, or other
gcgaaagggcaatcaagctattagaaacacacgcaccttgcggatcatgtaactgcaggttctgcaaaaaaaganaaaaggcaattatacagtcatagtcacaggcagagaaatctgtacacgaaataagtaagtaggtt

SEQ ID NO: 6120 - DNA, 287 bp, Zea mays
  misc_feature: Incyte ID No: 700458418H1
  unsure 134, 165, 167, 172, 180, 187, 194, 230, 275, 283-284, 286: a, t, c, g, or other
ggctcgggccgctcggctccgtcctcccccacatccacctgcccgtttctcgctccgaagcttctcctctcgcgtctcgtaccaggtcaggagggagggagggagacgggagaaccagggagcggaggcgtgcntgctgcggcctgcggctgcaggaccagagancngggantgagctanggttggnatggaangcggagatgtcgacgccggctaggaaccgctgatgnggatttcaagcggttgcagcaggacccgccgccggcatcagcggnctcgtacnnana

SEQ ID NO: 6121 - DNA, 84 bp, Zea mays
  misc_feature: Incyte ID No: 700458420H1
  unsure 2, 4, 10, 13-14, 17, 31-32, 41: a, t, c, g, or other
ananaggtancanncanattggtgatgcagnnaaaaaggangatgctcctgctcctcccgagagcaaggcctccaagaagaaga

SEQ ID NO: 6122 - DNA, 287 bp, Zea mays
  misc_feature: Incyte ID No: 700458421H1
  unsure 181, 272, 276, 284: a, t, c, g, or other
cgtccaccagcctcgtcgttaggacgtaaggtaagacagccaggggtcagccagtgagtactgactgagtagcccgaagctcagagcaagcgggtgccaactgccaaggggggtgatggcgctgtctcgacgcatggcggctcccgtcctcgtcctcctgctcctcctcgtcgccacagangcggggacgaccaaggtggcggaggcgaggcactgctgtcgcagagccaacggttcaagggcctgtgcatgagaataaaatttgccccaantttnccaaaccnatt

SEQ ID NO: 6123 - DNA, 290 bp, Zea mays
  misc_feature: Incyte ID No: 700458423H1
gcttcccagagacccagccatggcgatctcccagatctcacgcatattcctggccatccttctcctggccgccgccttcgccgccgccccagctgcgcttgcggacggcgacgacgtggtggcccttaccgaatccacgttcgagaaggaggtcggaaaggaccgcggcgccctcgtcgagttctacgccccactggtgtggtcactgcaagaagcttgctcctgagtatgaaagacttggtgcaagttttaagaaagctaaatctgtcttgattgctaaggttgattgt

SEQ ID NO: 6124 - DNA, 147 bp, Zea mays
  misc_feature: Incyte ID No: 700458424H1
  unsure 2, 69, 74: a, t, c, g, or other
gncgaaagggaatcaagctattagaaacacacgcaccttgcggatcatgtaactgcaggtctgcaaaanaaganaaaaggcaattatacagttcatagtcacaggcagagaaatctgtacacgaaataagtaagtaggttatgaaaa

SEQ ID NO: 6125 - DNA, 286 bp, Zea mays
  misc_feature: Incyte ID No: 700458426H1
  unsure 60, 193, 232, 274, 285: a, t, c, g, or other
cccggcggccgaccccctttcttccttcctccgccaccccggcgcagttctccttctccngtcgcgtcgccatggcgcgcgacgccaccgccacatccgtgccagcgctccgcccctggcttgttgacctcctcccgctcctcgtcgtcctcctcatcgccgcccacgtcctcgctctcggttactggattancaggctcgccacggacgggtccaggcagcccgcgcgganaaagaagcactaaggggaggcgcccgcggcggatgtaagttnaaacagttttnt

SEQ ID NO: 6126 - DNA, 289 bp, Zea mays
  misc_feature: Incyte ID No: 700458427H1
  unsure 47, 72, 199, 205, 262: a, t, c, g, or other
tcgcaccccgcgagcggtgacttccctagggtttagtcgcgccagcncgccgccgccgaaacagcacatcgntctctcgagctcagccatggcggaggtggagcagccccaggacgcggtgaagctcttcaaccgctggaccttcgacgatgtccaggtgaacgatatctcgctgaacgactacctggctgtgactgcngcgaanacgcgacattcctgccgcactccgcggggcgctactccaagaagcggttccgcaagngcatgcgccatcgtcgagcgcctcact

SEQ ID NO: 6127 - DNA, 292 bp, Zea mays
  misc_feature: Incyte ID No: 700458428H1
  unsure 10, 52, 75-98, 119: a, t, c, g, or other
agaaaggtancaaccaaattggtgatgcagagaaaaaggaagatgctcctgntcctcccgagagcaaggcctccnnnnnnnnnnnnnnnnnnnnnnnnagttcaaaggagggaaaaganacacaagaagcacttgatgggtcagaggagactgccagtgcaggacctgatgaagatacttctgctgtggatgtgaaggagcgcttgaagaagatggcatcaatgaagaagaagaaatcgagcagagagacggacacagctgccaaaattgccgctgccgaggctgcagcaag

SEQ ID NO: 6128 - DNA, 292 bp, Zea mays
  misc_feature: Incyte ID No: 700458429H1
  unsure 75-98: a, t, c, g, or other
agaaaggtaccaaccaaattggtgatgcagagaaaaaggaagatgctcctgctcctcccgagagcaaggcctccnnnnnnnnnnnnnnnnnnnnnnnnagttcaaaggagggaaaagaaacacaagaagcacttgatgggtcagaggagactgccagtgcaggacctgatgaagatacttctgctgtggatgtgaaggagcgcttgaagaagatggcatcaatgaagaagaagaaatcgagcagagagacggacacagctgccaaaattgccgctgccgaggctgcagcagg

SEQ ID NO: 6129 - DNA, 295 bp, Zea mays
  misc_feature: Incyte ID No: 700458431H1
  unsure 188: a, t, c, g, or other
ccaagccataattatttcagacataataacttcttcagataaactgcctactccttcaaatccgtatccatcttgtggtccttctgcaaaaagtatttctgcagatgtatctcagattgcatctccacaggatgctgaagttaaagtcgcaattctgactgtaagtgacactgtttcatcaggtgctncccctgataggagtggcccaagagctgtatctgtagtgaatcttcatcagagaaactgggtggtgcaactgtggttgccactgcagttgttcctgatgaagtggaca

SEQ ID NO: 6130 - DNA, 126 bp, Zea mays
  misc_feature: Incyte ID No: 700458433H1
  unsure 67: a, t, c, g, or other
ttcaatagatcgcagcgaggggagctgctctgctacgtacgaaaccccgacccagaagcaggtcgtntacgaatggtttagcgcccaggttcccccacgaaacgtgcggtgcgtgacgggcgaggg

SEQ ID NO: 6131 - DNA, 215 bp, Zea mays
  misc_feature: Incyte ID No: 700458434H1
  unsure 4, 6, 13, 58, 61, 67, 85, 103, 111-112, 130, 132, 145, 149, 161, 174,176, 180, 185, 194, 199, 202, 210-211: a, t, c, g, or other
ctcnanccgcggnagagcgggacgttcaagggggtgcaggtggaggacatgcactacncanaacggncggagcacggcctgcgangacgtgctcccttcccangtggccgnntgcaccgacctcaacacnancgccttcctctanccgngtcttccgcgcngaggatcccgtcntngtcntcttnacaggtganagatntangtgctttnnatgt

SEQ ID NO: 6132 - DNA, 288 bp, Zea mays
  misc_feature: Incyte ID No: 700458435H1
  unsure 194, 226, 236, 263, 265, 277, 281, 284, 287: a, t, c, g, or other
gactcgatctcgcacctagggtttcgtctcgccgctctcgtcctccgcgaagatgccgaagaacaagggtaagggaggcaagaaccggaagcgaggaaagaacgaggctgacgacgacaagcgcgagctcgtcttcaaggaagacgggcaggagtacgcgcaggtgacccggatgctcggcaacgggcggtgcnaggccatctgcgtcgatggcaagcgcggcttnttcaatatcnggggtaattccacaaaagttttgaacncnggttggaaattncccntcnggnt

SEQ ID NO: 6133 - DNA, 287 bp, Zea mays
  misc_feature: Incyte ID No: 700458436H1
  unsure 286: a, t, c, g, or other
aaatcccatgtgtttgggtggagaagaagaaaggaactccagtgcagcaaacaccccgtgttcgatgaaatgtttaaatcagaatcattagcatatccgcagttggtttagctatggtacgttaattaatcacgtgatgcggaagacgagccaagtcgaccccaagatgacgtaacgggtgggctactcctcatggtgatgctggtgggtgaacttgaagatttcgtgatcggatcaagcgccaggatgtgagatgctcgccaaatggacgtcgtctaacaaacant

SEQ ID NO: 6134 - DNA, 291 bp, Zea mays
  misc_feature: Incyte ID No: 700458437H1
  unsure 8, 123, 140, 162, 166, 176, 184, 188-189, 200, 204, 206, 209, 212, 243,247, 251, 255, 257, 262, 264, 267, 276, 278-279, 288-289: a, t, c, g, or other
gtacgtanaagcctctcatcagcaatggagtccaccaagctctccgcgctgctggtgctcgctcatgctcgcgctctccttcgtccccgcttcgctctcgcgtgggagaaggcggaaccggantgccactcgtgcgagtncggctcgcagccctcgaccggnggtntccccctganttcccgtnaagnntacggtaagtnccgntngcnccntgtcagcataacggtaggtccccctgcaccntttnagcntacntnattcncntgnttgtttaanannctcaaattnntt

SEQ ID NO: 6135 - DNA, 87 bp, Zea mays
  misc_feature: Incyte ID No: 700458438H1
  unsure 31, 47, 59, 86: a, t, c, g, or other
tgactggaaccttcccgagagaggatacaanaggcacccggattcgnggaaacccaatnccatttccattccaacaccaaccagang

SEQ ID NO: 6136 - DNA, 280 bp, Zea mays
  misc_feature: Incyte ID No: 700458441H1
  unsure 140, 171: a, t, c, g, or other
tgagcatactcgtgaagttgactacgccgacaaatctgtcaccgagaacactcgggctgcctacccgatcgagtacatccccaacgccaagataccatgcgtcggcccacaccccaagaacgtgatcctgctggcgtgcnacgccttcggctgctcccgccggtgagccangctggacctggcgcagaccatgtaccacttcatcagcggatacaccgccctggtcgccggcacggaggacggcatcaaggagccacaggccaccttctccgcctgcttt

SEQ ID NO: 6137 - DNA, 285 bp, Zea mays
  misc_feature: Incyte ID No: 700458443H1
  unsure 61, 92, 193, 214, 240, 244, 259, 264-265, 269: a, t, c, g, or other
ccgtcctccagcactccagctgcatcgacgaggaccgccgtagcgatttgcgaacaagggnacgggagaggaacccgaggaaggcgaaaatnatctaccgcaactggtcgctgctctcgtccacagtcgtcatttggggcggcgtcgccaccgccggcctcgccggtatcttcctctggggcggcaaggaganttcaatggttatctgtgccgngaagcgagaggcttaggcagcagganaganccgcgatgggccgangttanncgtnacttctttgtatctca

SEQ ID NO: 6138 - DNA, 289 bp, Zea mays
  misc_feature: Incyte ID No: 700458444H1
  unsure 34, 233, 278, 285: a, t, c, g, or other
gctccgcaaaccagcgcaagcccttccctgacancggcggcgacatggtgctcgaggcgacgatgatctgcatagacaactcggagtggatgcggaacggcgactacgccccgtcgcggttccaggcgcaggccgatgccgtcaacctcatatgcggtgccaagacccagtcgaacccggagaacacagtaggcgtgatgacgatggccgggaagggcgtccgcgtgcttgtnactcccaccagcgacctcgggaagattctcgcctgtatgcacggnctagtantttt

SEQ ID NO: 6139 - DNA, 286 bp, Zea mays
  misc_feature: Incyte ID No: 700458450H1
  unsure 2, 151, 260, 278, 283: a, t, c, g, or other
gntcaatcttctaatttagataggaatctgcaggacaacttggctagctcttcattgaatggtagggctcccaaatagtggtcaacttgatggggaatgtgacaatggggtgacaagggttccaagcgataggacaaattacagtagtganccatctggaggggttacagatggcggtgctgcgcccgtagcctcttctgttcctcaaagggaacacttaattcctgcaagattgggtactagacaatttataaggcggnacaatcagttaggggttncccanatt

SEQ ID NO: 6140 - DNA, 287 bp, Zea mays
  misc_feature: Incyte ID No: 700458451H1
  unsure 25, 52, 62, 66, 152, 154, 161, 172, 183, 230, 234-235, 248-249, 271, 286: a, t, c, g, or other
aagagaaagaaaagttgattgactnggactacttaactggaaacccactgancaaatgatantttngctatatgctgtacctgtgtgtgccccttacaacgcattgcagacatacaaatatcgtgtaaagattaccccaggcactgcaaagnancggaaanctgcaaaaacngcgatgagctngttcctgcacacacctgatgctaccaaccgtgagaaggagctcatgnaggnngcacagaccctgnnctggtggctgcaatcgtcgggnatgccagttcatagnt

SEQ ID NO: 6141 - DNA, 285 bp, Zea mays
  misc_feature: Incyte ID No: 700458452H1
  unsure 183, 229, 254, 257, 260, 265, 269, 276, 278-279: a, t, c, g, or other
cgcattcgttccaactcctgagcactttctcctcgtccccgacaagccaatcgaagccgagatacggccatggactccaccggcaccggagcagggggtaaggggaagaagggagcggccgggcgcaaggtcggcgggccaaggaagaagtcggtgtcgaggtccgtgaaggccgggctccanttccccgtcggccgcatcgggcgctacttgaagaagggccgctacncgcagtgttcggcaccggcgccccnttntancttgnctgntttcctngnntatttt

SEQ ID NO: 6142 - DNA, 285 bp, Zea mays
  misc_feature: Incyte ID No: 700458453H1
ctcagactcagagcaagctctctcgtaagaggcatttggcggcaagtaacaagataagaatgagaatggcggcggcgagcaacggcgcccccctggtggtgttcgacttcgacaagaccatcgtcgactgcgacagcgacaactgggtcgtcgacgccctcggcgcgacccgccgcttcgacgagctcctgcgccacctcccatggaaccacgccatcgatgcaatgatgggcgagctgcactcggagggcaagacggccgaggacatcagaggcagcctcagat

SEQ ID NO: 6143 - DNA, 284 bp, Zea mays
  misc_feature: Incyte ID No: 700458454H1
  unsure 89, 181, 268, 274-276, 282: a, t, c, g, or other
ctcctatctggtataggacggagctgagcttctagcaacgtacagtgtatccgccatgagtcctttccggggcggtgatcacgccaganaccctcaagtacatgtccaagtaccagggacgtgagatcacgcaggtggactgcgcacgggaggcgatgaggctgatccacgcggaagacangaacctcaaggccgaggactcagcgtgggagctgaagaagaagttcggcaacggcgtgagcaccatggtcctcgtctacaagccacnggggcnnncctgantt

SEQ ID NO: 6144 - DNA, 75 bp, Zea mays
  misc_feature: Incyte ID No: 700458456H1
  unsure 5, 36, 39, 47, 54-55, 71: a, t, c, g, or other
aaccnagtccacctgactaccagacaaccgtggcgnggnccatgtanccaaatnnagtataggcgataganattg

SEQ ID NO: 6145 - DNA, 285 bp, Zea mays
  misc_feature: Incyte ID No: 700458459H1
  unsure 3, 16, 20: a, t, c, g, or other
ggnatggcagcttgcntggnaatggtcagagaaggaaggtgagaatggtaggaaggaaggtggtttcaaaagagtctacttgcaccaagagggagttcctggctcaagaaggggctcaattgtttcacttcccggtggtggcgatgttcttgagggtagtgagtttgtacatgctgctgctttagtaagtcagtcagcacttttctcaaagggtcttgctgaaccacgcatgtcagatgctgccatggttcacccatctgaggtagctgccaaagttcacgttgg

SEQ ID NO: 6146 - DNA, 280 bp, Zea mays
  misc_feature: Incyte ID No: 700458461H1
  unsure 208, 226-227, 258-259, 261, 263-264, 268, 275-276: a, t, c, g, or other
tcggtcattccacttccaccaatctgtctcccaatctttcttgctgctccaattcgctctctttactcggccagcggaaggggagaggagggcgagatgacggtggagaaggtggacgcggggctttccgacttcgacgcccacttcgatcgcctcttcgcttccccggacgccgcctccgacggcaaggtgaagctgctgctcttcntggccgacgcaagcttgnntcttccctctcctggtgcccagataaaatgnncntnngttntttatgnnggtt

SEQ ID NO: 6147 - DNA, 288 bp, Zea mays
  misc_feature: Incyte ID No: 700458462H1
  unsure 84, 162: a, t, c, g, or other
acccgcatccataaacaagaaaaagaaaagaaaacccctgttgccagcgacagaagaagaaggggccccttctccttggttgcnttgcgcctccctcctgtctgcgtgcgtgcaatcgacgcagaggcgcgggcgctcgcaccaccacaaccacgacccganggctttcatgcgctcccgctcaaatgcatcttctggcatgggagttgctcctaacattagggagacattcgttgagcttcaaatgaagaaggcattccgatatgttatcttcaaaatcgaagagaa

SEQ ID NO: 6148 - DNA, 288 bp, Zea mays
  misc_feature: Incyte ID No: 700458463H1
  unsure 2, 26, 61: a, t, c, g, or other
gncctcatcgtcgtagcgatgcaganggaggcgatgccgctcgtccacaagttcaagctcntcgaggcgcccgcccacgaatccacatttcctaaaggtgccccatgggttaggtaccatggcaactacaaaggcctccacattgaccttgtattgcctggaaaggatgctgttttaggagtcgacagtgttggtacggtatcggcagctcttttgactagtttttccattcaaacattgaagccagaccttatcattaatgctggcactgctggtggcttcaagcca

SEQ ID NO: 6149 - DNA, 280 bp, Zea mays
  misc_feature: Incyte ID No: 700458465H1
  unsure 24, 32, 41, 66-67, 78, 111, 167, 181, 188, 194, 205, 207, 223, 236, 244,246-249, 258, 260, 264-265, 269-270, 272, 275: a, t, c, g, or other
gacgccgtggcggcgcggtacccngggtcgangcgcgagtncggcgccgcgggcctcaacgtcttnncgcctcgtgtngcgcacggcgttcgtggctgtcatcacgctgcnggccatcctcatgcccttcttcaacagcatcctgggcatcctcggcagcatcgccntctggccgctcacngtcttcntccccntcaaaatgtananccggcaacggcaagtnccgaaggttaacnccaagtgnannnnctaaattcnantttnnttgnncnacnacgac

SEQ ID NO: 6150 - DNA, 134 bp, Zea mays
  misc_feature: Incyte ID No: 700458467H1
  unsure 29, 37, 65, 69, 78-79, 94, 96, 99, 101, 106, 119, 124, 129, 133: a, t, c, g, or other
ccgaaccaaaagccactcggatccatctnccactctnccctcctcgtcatcggctgctccgcctncacntccgctcgnnccctgatccggatcnangangncgacnccagatccctttnctctncgccntctnt

SEQ ID NO: 6151 - DNA, 282 bp, Zea mays
  misc_feature: Incyte ID No: 700458468H1
  unsure 257, 278: a, t, c, g, or other
atggttcttgcttctgcttactcgcatgagttgccacgatatggtcttgaagttggtctgaccaactatgcagctgcctactgcactggccttctgttggctcgccgtgtgctcaagacccgtggtttagataaggaatatgagggcaatgttgaggccactggtgaggacttctctgttgagccagctgatgagaggaggcctttccgtgctctcttggatgttggccttattaggactacaactgggaaccgtgnctttggtgccctcaagggtancttt

SEQ ID NO: 6152 - DNA, 282 bp, Zea mays
  misc_feature: Incyte ID No: 700458469H1
  unsure 48, 167, 256, 261: a, t, c, g, or other
gacgcgcgccaccacatgctgggccgtctctcctcgatcatagccaangagctgctcaatgggcagaaggtggtcgtcgtccgctgcgaggagatctgcatgtcgggcggcctcgtccgtcagaagatgaagtacctccgcttcctccgcaagcggatgaacaccangccgtcccacgggcccatccacttccgcgcccccgccaagatcctgtggcgcaccatccgcgggatgattccgcacaagaccaagaggngggangcggctctggcgaggctcaat

SEQ ID NO: 6153 - DNA, 283 bp, Zea mays
  misc_feature: Incyte ID No: 700458475H1
cgcacacacacaattaggtcacatacacacatcccggctgcctccctaggtagcagcttctacaatggaggcatccaacaagctcgcagtcttgctcctgtggctggtcatggcagctaccactgccgtgcacccttcctactccgagaactcgcctcaagactacctcactccccaaaacagcgcccgtgccgccgtcggtgttggcccggtgatctggagcacgaagctgcagcagttcgcggagaagtacgccgcacagagggccagcgactgccgtctc

SEQ ID NO: 6154 - DNA, 282 bp, Zea mays
  misc_feature: Incyte ID No: 700458476H1
  unsure 3, 45, 62, 88, 108, 248, 250-252, 258-260: a, t, c, g, or other
tangtatgaagagcttgacaaggaagcgcaagttcagatgaatgnggaactatctggttggnagcttgtccgtcggtgatgtattcanagagccatcttgctccaagntgttatgcataatgattggtgatggggttcagattttgggtatggcagtcgtaacaatcgtttttgccacacttgggttcatgtctccagcctcaagaggaatgctccttactgggatgattgttctatatcttttcctngnnnggtgannncggtatgtcagtgttcggttct

SEQ ID NO: 6155 - DNA, 283 bp, Zea mays
  misc_feature: Incyte ID No: 700458477H1
  unsure 13, 102, 185: a, t, c, g, or other
agaagcgcacgcngcgcgccgaggtgcgcagggcgctgaaggccctctctgccgaccagcgcgccagcgaagatctggctattcaaactacaatactggatncctcttggttcaaagcaagcaaacggttgtgcgcttatataagctgtcagcagttgcgagaagtcgatacatcaaaaatactngcagagtgtctaccgtcaaatcctggacaagaggaactagcaaaggatctttatgttcctcgagtggaggataagaaccgtaatatgaggatgctcaa

SEQ ID NO: 6156 - DNA, 283 bp, Zea mays
  misc_feature: Incyte ID No: 700458478H1
  unsure 118: a, t, c, g, or other
cgccgccgtcgcactccgtctccacccaaggttacatgcctggccgtctgtacgacctggacgcgtccaagtacgggacggcagcggagtcaagtccctgatcgccgcgttccacggnaagggcgtgcaggtggtggcggacatcgtcatcaaccaccggtgcgccgactacaaggacgcccgcgcgcatctactgcatcttcgagggcggcacgccgacggccgcctggactggggcccccacatgatctgccgcgacgacaccatatactcggaggcaggc

SEQ ID NO: 6157 - DNA, 148 bp, Zea mays
  misc_feature: Incyte ID No: 700458482H1
  unsure 38, 76, 84, 138, 140-144: a, t, c, g, or other
atttcccagggaggacaaatgatgcactcaaagaacantggagaagtcctatgaaaagaaaactggattcatattnggcctcangattgctcgaacatgttccagacctgcaagatgatgtatcatttccacacaacngnnnnngttc

SEQ ID NO: 6158 - DNA, 278 bp, Zea mays
  misc_feature: Incyte ID No: 700458483H1
  unsure 274: a, t, c, g, or other
tggcctcagttgaggacaagatattcagaaaaatacgggataaagaggcggaagtggaaaccatcaacaaaaggaactctgaactagaggaccagattaagcatttgggagtggaagttggtgcttggcagcaaagggccaagtacaatgagagcctgatcaatgcactcaagtacaacttggaacaagtatgtgctcaccagagcaaggacttcaaggaaggctgcggtgatagcgaggtagatgacacggcgtcctgtcctatggtggtgcntcaa

SEQ ID NO: 6159 - DNA, 272 bp, Zea mays
  misc_feature: Incyte ID No: 700458488H1
  unsure 52, 61, 146-162, 178-179: a, t, c, g, or other
aggccgcgagcttcggcgggaccaacattcgacccgacggcgtgggaggacnagaagtgcnccggcgagtcgcgcttccctgcgcaggtaccctactgtactgtctgcttcgatccacagtctagtactctagtctagcagccatnnnnnnnnnnnnnnnnngtgatcgatcagctcnncagccgccggccacactagcgaactgacttgtacgcttgtttcaattgtgttcaacaccaccaaacagtacatgtatacatgtatcaccgaca

SEQ ID NO: 6160 - DNA, 278 bp, Zea mays
  misc_feature: Incyte ID No: 700458493H1
  unsure 72, 105, 173, 228, 247, 265, 267, 269-273: a, t, c, g, or other
gctggccaagtgagcccctggtggccagggcggcgaccaggaacgtttaaaaccctaaccccctttccatcnctaaaaggggcgtcgctgttctgttgatcaaancctctatgctgttagttggaaacttcgggtgtagttggtggatttgctggtgtgtgccttgtgttcgnggaaattcctgtgaaggaactgccatgtgttaggctgttaccatgcccatttctnaatactatgtgtagactgngaccaaaaaaaaaaaaangngnnnnncatct

SEQ ID NO: 6161 - DNA, 280 bp, Zea mays
  misc_feature: Incyte ID No: 700458502H1
  unsure 25, 87, 186, 258, 260-261, 264, 268-269, 277-278: a, t, c, g, or other
ttctcctccactccactcccaagtncccaccacccccaaccccgtctctccactgcggcgcaggcttcgcttccggctccgctcggntccgagcagaagaaaatgcaacgggcagtgcaggccgtcaggtcacacggcaatgttcttaaatatgctgttctacaacacatcagcgcttcccaagcnagcaatgcttcctgctgtcttttctcgtttcatgtcagtttcatctgctccgcctagaggatcgtggatttncnnctnccanngtaacagnntt

SEQ ID NO: 6162 - DNA, 274 bp, Zea mays
  misc_feature: Incyte ID No: 700458506H1
  unsure 41, 133, 157, 196, 250, 258-259: a, t, c, g, or other
taggagcattcgagaagccgaagaaaattcgaagacgaggngcagctacactgcggacggacttcgggcatggagggccagttccaggttggcaaggaggaggtcatccaagcatggtacatggacgacagtnaagaggaccagaggcttcctcatncatcgcgagcccaaagaattccatcccctctcgacaaantttccgaaacttaggaatattaagctggcgcctaaatgctgatgattgggagantgatgagnncctcaagaaattctg

SEQ ID NO: 6163 - DNA, 153 bp, Zea mays
  misc_feature: Incyte ID No: 700458507H1
  unsure 35, 44, 46-47, 62, 65, 90, 92, 123: a, t, c, g, or other
ctcggcagggtgtggcataccatggagagctcgtncgccgtcantnnccgttccccgctgcngcnggcgccggtcgagagcacctaccgngnctgcaccatcccctaccgtttcccctccganaacccgcgcaaggccacccctgtcgagatc

SEQ ID NO: 6164 - DNA, 272 bp, Zea mays
  misc_feature: Incyte ID No: 700458509H1
gcgagagagaacccaaacggagagagacaatcgagagagatggcaaactgttttggtgacgtcgtggacaattacaagctagacacaatgccaagatatatcggcaaaaagaagactcgagaagaccgggcacgagaggcctcctatctcagtaatgagaatgagaagtacaagaaagctaaagactatgtgaacatgctgaaggactggtacggcaatggagcgtcgacgctgtgctgatctacaaccagacgggcggaaccctgcggtac

SEQ ID NO: 6165 - DNA, 269 bp, Zea mays
  misc_feature: Incyte ID No: 700458510H1
  unsure 132, 167-186, 235, 243: a, t, c, g, or other
cgaggttctcgtctacaaggtttatgtcgatgaagatgcctccatatccaccatagaaaggagggcgagcctgaaggaattctacactatcatataccctttcttgcaacaactggaggacaacttgatggncaaggactgcaaggacaaagggtggtctgctgctnnnnnnnnnnnnnnnnnnnntcggaagcttgttgccgaagatgaccagggaggatgagtgtggcatttncctggagnctgcaccaagatggtcttccgattcc

SEQ ID NO: 6166 - DNA, 268 bp, Zea mays
  misc_feature: Incyte ID No: 700458511H1
  unsure 201, 249, 255: a, t, c, g, or other
gaagaagacagcaacacaagcttagtcgtcctcgtaccccccaatcttcagcccttgttcatcaacaaaccacatggccgcgctcggtcctgcttctgttacctccacgggcttggcgctgcacacccctgcgattcctcatcgtcggcgtcgccacgggaatgcagtggcctgtgcgtcgtcgtctcaacaccagcgaancttaatggcttggcgatgagttttcaggcacgaacatgcttgcccatnaaaggnttccccatacagg

SEQ ID NO: 6167 - DNA, 275 bp, Zea mays
  misc_feature: Incyte ID No: 700458512H1
  unsure 168, 237, 241, 255, 264, 269-270: a, t, c, g, or other
acttatttggttccgtacggtggaacgtgaaacgaacgcgtttacttcacagtgcctctgctacttggcaagcgtatgcatggccgtggacccggcgcgccacgccgcaacgccgtgcgctgtcacactcacactcttgctgcgcgcgtacgttcgtccccggccgcnagggtgtacgacgatcgaactggtattggcgatgtacgaatgctagcgatattgagctaatcgacgacnatcntagcgtacgatcgntgcatggancatcnntcggg

SEQ ID NO: 6168 - DNA, 277 bp, Zea mays
  misc_feature: Incyte ID No: 700458513H1
  unsure 20, 60, 85-86, 93, 162, 166, 170, 191, 198, 213, 241, 251, 262, 271: a, t, c, g, or other
gctccccatcttcatccgtnaaccatggcgacccagatcagcaagaagaagaagttcgtncagcgacggtgttttcctacgccgnnctcaatnagatgctgacgcgggagtggcggaggatggctactctggcgtggaggtgcgcgtccacgccgatgcgcncggngatncatcatccgcgccacgcgcangcagaangtgcttcggcgagangggccgcaggatccagggagcttacctncgtcgtccanaagaggttcancttcctganaatggc

SEQ ID NO: 6169 - DNA, 271 bp, Zea mays
  misc_feature: Incyte ID No: 700458514H1
  unsure 157, 259: a, t, c, g, or other
gtttcaaccggaagaacaagaccctgggctccctctttaaacagaaacgtgttctggaattgctagagaagaactacaagactatgcagtctctccaaactgtgcaagatgcagaaatgggtgaggagaagatgtccgcagacgatgtcgcgttgcnggctaatatggttgaagatatgagcatggagactggctatgataaggaagatgatgaaatggaaatggatgatgcagacatggctggagatggtgctgccanctttaaagaaaa

SEQ ID NO: 6170 - DNA, 273 bp, Zea mays
  misc_feature: Incyte ID No: 700458516H1
  unsure 162, 199, 203, 211, 224, 272: a, t, c, g, or other
catagcctgaactctttccgcacttttttccagtcgagcgtgtgccgtccgtgtacagcatggccggctccctgaaggctaggaggatgctttgctagataatcacgagtacctgtgcgctgaatcgcaaataattttcatggacctcacctaacgaaaggnacagtggagctgtaccgttaccgtggactgacataangtcnctcacatncaatgttatattncggtgctgctactatgatgatgatgagcttcaggctctagattttttnc

SEQ ID NO: 6171 - DNA, 92 bp, Zea mays
  misc_feature: Incyte ID No: 700458517H1
  unsure 14, 47, 71, 88, 90-91: a, t, c, g, or other
tttcttccccctgnccttccaaaaacttcagaaaaccctgatccgcnggcggcggccatgctttctaccancaccgcttcctccctangnnt

SEQ ID NO: 6172 - DNA, 271 bp, Zea mays
  misc_feature: Incyte ID No: 700458519H1
  unsure 223, 267: a, t, c, g, or other
tcctcatccaggatggtgactccaagaagttcttgaaggttcacgttgaggctgaccagatccgtcctccttggttgaaggagtactttgacggcaattgactccgttcaggaagtctgagcctattcctgaggtcaacaatgagcctgttaaggtggttgttgctgacaacgtaccacgacttcgtcttcaaatctggcaaaaatgtccttattgaattctnatgcccccggtgcggacatgcaagaagctggcgcccatcttggngagc

SEQ ID NO: 6173 - DNA, 271 bp, Zea mays
  misc_feature: Incyte ID No: 700458520H1
  unsure 44, 197, 242-243: a, t, c, g, or other
ttgcgatcaagtctctgcgggcatcaagcatgtccgcatgaganggtagaggtctccgacggttcctgatcggagagatgaaggtgcatcctcaaggaagttcacaaggactgctagccagcaaaggagcgtgataatagaggatttagcaccctccccagagattaatggggaaaaggagaaagaaactgaagttncagagaagagatggaaagtattgtgtggaagactgctgtttatcnnatcaccccggtatgctccttgcattcaa

SEQ ID NO: 6174 - DNA, 273 bp, Zea mays
  misc_feature: Incyte ID No: 700458521H1
  unsure 131, 145, 147-148, 173, 175, 200: a, t, c, g, or other
agcagctgtccgccaccatcggctcaaaggctgaaatcaatgaggcatttgaccaaaaagatcacattcatgagcggcataaggtgttaaagaaggattctgatgttttattcagcaacctgaaagttccnagaggagaacacangnnagattcaaaaatcttttgctgatgnangaacagttctcagaaaattaacagnggaaacaccgagccgctaatgaaatacgtccaaaggccttacagcgattggatgagcttagatcagagccccc

SEQ ID NO: 6175 - DNA, 103 bp, Zea mays
  misc_feature: Incyte ID No: 700458522H1
  unsure 3, 5, 38, 55, 60, 69, 73, 76, 79, 85, 89, 101: a, t, c, g, or other
cgnanatccactaccaccggggcccacggcgtacgcancgggcaacatccaagtnccttncacacgtcncttnctncancaaganctancgaggtcgccgngt

SEQ ID NO: 6176 - DNA, 127 bp, Zea mays
  misc_feature: Incyte ID No: 700458523H1
  unsure 7, 65: a, t, c, g, or other
gcaaganaactagaaaaggctcctcccgaccgcaacgcccctcatctaccctcgaccccgacatnccccgacccgatggcgcccaaggcggagaagaagccagcggagaagaagccggcggccgagg

SEQ ID NO: 6177 - DNA, 278 bp, Zea mays
  misc_feature: Incyte ID No: 700458524H1
  unsure 88, 90, 160, 206, 208, 213, 255, 277: a, t, c, g, or other
aagaaactccgaccggccggtgggcggtggcggcagccggcaggatctgtgccgcgatggcgacgtcgaacacggcgcggatggaggncngcggcggcgacctgcggagcaccatcaagaagtggaatatcatctaacctgtctacctcaactcccaagnagacggtcgcccgagggccgccgacatcgccgctgccaagggcctncncgganccccacctgcattcgagatcgctgactgctgttcgcaccttnaaatcccccacgcccatcaatng

SEQ ID NO: 6178 - DNA, 229 bp, Zea mays
  misc_feature: Incyte ID No: 700458525H1
  unsure 31-32, 42, 98, 104, 106, 200: a, t, c, g, or other
ggaacatagtgccgctttcttccgttgaacnncagtagcatngctatgcttgtgtaatttgtgtgttggatggaggagcataatagcatatagcggtncatggngnaccctgtacagggtggctgagctgcatcctgaaggctggttgttcaggtgcgtccgtgactgtctgttggttctgttttcgggctattattatngggccggatatttctagcctactctttgg

SEQ ID NO: 6179 - DNA, 267 bp, Zea mays
  misc_feature: Incyte ID No: 700458526H1
  unsure 32, 66, 225, 230, 259: a, t, c, g, or other
caggctcagatgaactttctgtagtgtttccnggtgttatcgcgcgctttgatggtgctgaccttncagaacgttcttaaaaaagcatttcaagatgtaaaatccacgcctgtggaaagataagtttgaagagcaagatgctgaggatgaggaaacttttggacgaataccctttcagatttggaatgtaaacaagttcagttcatgcgctgatgctgcattgtnggtcngatgccacctccctgttagaacttcatcnagtcaccc

SEQ ID NO: 6180 - DNA, 255 bp, Zea mays
  misc_feature: Incyte ID No: 700458527H1
  unsure 47, 56, 58, 61-62, 65, 68, 76, 85, 89, 101, 135, 150-151, 166, 168, 174,210, 222, 230-232: a, t, c, g, or other
ctccaggtttggggggaaaaggcctcgcgggtacgcaaaccgcttcnctgttgaantnggnnttnggnggcgctcnagttttcangtanaccatagtttantgacccatggctacgtactaagcaaactgctccncaagttccactgganngaaggctacctaggnancaattnccaccaaggctgcccgtaagtctgccacccacaacngggggagtaaanacgcctcnnnttcccgcccataatgttgtctcc

SEQ ID NO: 6181 - DNA, 269 bp, Zea mays
  misc_feature: Incyte ID No: 700458528H1
  unsure 154, 171, 177, 188, 192, 198, 218, 231, 243, 246: a, t, c, g, or other
caaacgcaacccatatcatgattgccacgggcaccggtgttgcccccttccgtgggtacctgcgccgcatgttcatggaagatgtcccgaactacgatttggtggcttggcctggctcttcctcggcgttgccaattcagacagcttctgtatnacgaggaattcaccagntatctnaagcagtatcnaganaatttnaggtacgacaaagccctcancagggagcagaanaacaggagcggnggnaagatgtacgtccaggacaagat

SEQ ID NO: 6182 - DNA, 263 bp, Zea mays
  misc_feature: Incyte ID No: 700458529H1
  unsure 59, 144, 146-147, 149, 151, 156, 216: a, t, c, g, or other
gggaaggagatccattgcttccgatggctgcctgccgtctctgacctccgacctctgcntccagcctccagccttctccggttctcccgccctacctgaaagcaactcctgatcggattcaggctaggtctcacagcacagccntnntntnatganccagcaaggagactgaacacgaattgatctctgcgccgtgcaaccccggcccgtcgaagncaggggtcggggatggttcaagacgatcatcagcaagaaaaaatcga

SEQ ID NO: 6183 - DNA, 240 bp, Zea mays
  misc_feature: Incyte ID No: 700458530H1
  unsure 11, 22-24, 37, 44, 79, 186, 212: a, t, c, g, or other
atcacgggggngttacccactnnntgggttgatgtcntcctaantacactccagagagcccaggagatgccaccaggancctctcccagcagtgcctgaacgcccttgctaatgttgtgcctggtcttatcggaggcagtgctgatcttgcatctccaacatgactctgctgaagatgtttggtgnttcagaaggatacagtgaagagcgcnatgtccgttcggagtcagagagcaggat

SEQ ID NO: 6184 - DNA, 269 bp, Zea mays
  misc_feature: Incyte ID No: 700458532H1
  unsure 116, 164, 171: a, t, c, g, or other
ggagccgcctcgtccctgccggtcccgacccccatcccgtccgcgtccaacgccatgaatcccgagtacgactacctcttcaagctgctcctcatcggcgactccggtgttgggangtcttgcctgctgctgaggtttgcggatgattcatatctggagagctntatcagnaccattggagttgattttaaaatccgcacgttgagcaagatgggaagacaataaagtacagatttgggatatgctggccaagaacgctttaggaccat

SEQ ID NO: 6185 - DNA, 137 bp, Zea mays
  misc_feature: Incyte ID No: 700458535H1
  unsure 23, 27, 32, 40, 60, 127, 129: a, t, c, g, or other
gacgtcaagatcctcttcacctngctnctgcnacaccgangtctacttctgggaggccanggggcagactccctgttccctcggatctttggccacgaggctggaggtatcatagagagtgttggananggtgtgac

SEQ ID NO: 6186 - DNA, 255 bp, Zea mays
  misc_feature: Incyte ID No: 700458537H1
  unsure 11, 13, 18, 20: a, t, c, g, or other
aaccacctgcnanggagngngttgatgccatggtagaatgacagttgatgccatggtaccatgacggacaagactacatacatccctttgtatgttttctcagagtttgcagcatggaccgacctccaccgaacactggcgcgtgtctcttgcatcttctgcctgaatgttaaatagaagctacttaggctggtgttaatgtacttcaaacatgaatctactttaatagtggatcatgcgatttattcatgttcc

SEQ ID NO: 6187 - DNA, 94 bp, Zea mays
  misc_feature: Incyte ID No: 700458539H1
gcgcgctcccctacgttttgttcttaactacctacccgtttaccctacactagtacgttactgaacttactacggcttgcactgctcccagcat

SEQ ID NO: 6188 - DNA, 253 bp, Zea mays
  misc_feature: Incyte ID No: 700458540H1
  unsure 52, 63, 98, 147, 194, 197, 216, 220, 223, 230, 252: a, t, c, g, or other
ctgcagcaccgacgggaacaacgggtgcagcggcggcgtcatggacaacganttctcgttatncgccaccggcgccgggctccgctccgaggaggcgntcccgtacctcatggaggaaggggactgcgacgacagggcccgcgacgncgaggtgctcgtccactatatccgggtacgaggacgtgccggcaaanacnagcagcgtctaaaggcccncccnacnagccgtnaggtcgccatcgaggctccggng

SEQ ID NO: 6189 - DNA, 269 bp, Zea mays
  misc_feature: Incyte ID No: 700458541H1
  unsure 103-106, 109, 222-223: a, t, c, g, or other
gggaaccgtaactcctcacgctgatcacgggatggtcaagagcagagaaccaaccctcctgcagaagcttcttagctctgatatcaagagggataaacgtagnnnnggntcacgtgttcagattcatgaccttgaacaatttctttaaggactggcctgacaggctttacagtttcctagtgttaagatgaatcagattgaaataggaagcaatattagcanngatgatttggagaatgctgggatgtccaaagacagcatcttggtgt

SEQ ID NO: 6190 - DNA, 269 bp, Zea mays
  misc_feature: Incyte ID No: 700458542H1
  unsure 67, 104, 230, 238, 248, 262: a, t, c, g, or other
cacctctgcaagggagcacatggctctcgagaaggccaaggagatcatccgcgtacctaccccggtncgacctagctctccgaaaggccaaggagaccgtcgcntcccaccccgtcgtcgtcttcagcaaaacttactgtcctttctgcacccgagtgaaacaattgctagcaaagttgggggcaagttacaaggctattgagttggatgtggaaagtgatggcgctganctgcagtncagctctcgntgatggatggccanagaatgt

SEQ ID NO: 6191 - DNA, 91 bp, Zea mays
  misc_feature: Incyte ID No: 700458543H1
  unsure 2-3, 20, 37, 54, 61, 79, 82, 90: a, t, c, g, or other
gnnaacccgtccatctactnctaccatcctttgccangcacactgcatgcagcngccgctnaagctacgcactgatttnttncctgagtng

SEQ ID NO: 6192 - DNA, 106 bp, Zea mays
  misc_feature: Incyte ID No: 700458544H1
  unsure 10, 40, 44-45, 47-48, 59, 61, 82, 96: a, t, c, g, or other
tgtgaccctncctcagcacgccgtacgcgtacgccatccntcanngnntccaaaggctncnactgcttgctccgcagccatngcgaagaactaacnccgaaccgtt

SEQ ID NO: 6193 - DNA, 268 bp, Zea mays
  misc_feature: Incyte ID No: 700458545H1
cgccgccgccctacgccctacgtccagctgcccatgtcttcttcgggccccttgccggcgggaactcaccagaccaggaatcgtgctggcaaccggcgcaagtctggagatagggctgataaagctaattactactacaataatgatggagagaagagcaatgttccttcattaaagaaccttcctccaattgttcatcatgaaacattcttcagcaatgttcagaatgactacaatcaaacaggattagtgcctttggagggatgtt

SEQ ID NO: 6194 - DNA, 268 bp, Zea mays
  misc_feature: Incyte ID No: 700458546H1
  unsure 3, 186, 202, 222, 251, 263, 265-266: a, t, c, g, or other
gtnattgctcaagcagattgtggagtagagatcagctctggtgtccatcatgcacgttgctgtgtctgcttcatgcaatggacctacagagaaaaaggtgaattcgaagtcaaagaagtttgtgaggtatcctgttgtgaacatgtggttagggtccagacatctaaagccagggaagaaagcgantccgcaagagaagtanaaatgataagacgtgttgtngcctgcaaggacgcggccaatttatcttntttgagtgagcngnnac

SEQ ID NO: 6195 - DNA, 118 bp, Zea mays
  misc_feature: Incyte ID No: 700458547H1
  unsure 22, 30, 58, 66, 82, 96, 102, 106, 110, 114: a, t, c, g, or other
gctcgccgtaactacgggtttnttcctcgncttcgactttccttaccttccggcagtncctacgtnctacgaattacgctcnacggtgggagaaanatcggngcgngagnatgnccgt

SEQ ID NO: 6196 - DNA, 163 bp, Zea mays
  misc_feature: Incyte ID No: 700458549H1
  unsure 107, 111, 123: a, t, c, g, or other
cgtcaggtcagcctccctctccggatcccccacctgctccgccgccggccaacgcatcgctaccccttggcagccaggatgacagaagcaccattctgccacgtganaggntcttcaagctgnaacatcatttccagaacatgaccaagcacactactgaaag

SEQ ID NO: 6197 - DNA, 266 bp, Zea mays
  misc_feature: Incyte ID No: 700458551H1
  unsure 256: a, t, c, g, or other
agcactgccaaatctcccaccaatgaaagttgctagagatggcacaatcatggagtgggcacaagactttcaggatcctgagattcatcacagacatgtgtctcacttgtttggtctttatcctggacatactatgtcacttgaggaaacacctgacctctgcagagctgttgccaatagtctttataaaagaggtgacgaaggcccaggctggtctacttcatggaaaatggtcctatgggctcgcttcacaacngtgaccatgc

SEQ ID NO: 6198 - DNA, 265 bp, Zea mays
  misc_feature: Incyte ID No: 700458552H1
  unsure 2, 191, 231, 264: a, t, c, g, or other
anaaccacctgccaaggagagagttgatgccatggtagaatgacagttgatgccatggtaccatgacggacaagactacatacatccctttgtatgttttctcagagtttgcagcatggaccgactcaccgaacactggcgcgtgtctcttgcatcttctgcctgaatgttaaatagaagctacttaggcncggtgttaatgtacttccaaacatgaatctacctttaatngtggatatgcgatttattcatgttctaaaaaana

SEQ ID NO: 6199 - DNA, 88 bp, Zea mays
  misc_feature: Incyte ID No: 700458553H1
  unsure 2, 27, 30, 65, 69, 74, 86-87: a, t, c, g, or other
gnggcgcgccacgaactcgcgacgctnctncgagagatccatggatcggcgcaagggcggcaatncgangtcancggaagcctggnng

SEQ ID NO: 6200 - DNA, 99 bp, Zea mays
  misc_feature: Incyte ID No: 700458554H1
  unsure 37-38, 40-41, 43-44, 84: a, t, c, g, or other
acatgcctatcatatagtaaaacccagcccatgagcnntnncnngggccctctcagccctcctaatgacctccggcctagccangtgatttcacttccc

SEQ ID NO: 6201 - DNA, 89 bp, Zea mays
  misc_feature: Incyte ID No: 700458556H1
  unsure 20, 46, 56: a, t, c, g, or other
aggttggctacatagcaatngatattcctcacagatactgtagaanctgcgaacangccatccagtggcagcaattgatggtcttgctc

SEQ ID NO: 6202 - DNA, 268 bp, Zea mays
  misc_feature: Incyte ID No: 700458557H1
  unsure 62, 75, 87, 112: a, t, c, g, or other
cgtcaggtcagcctccctctccggatcccccacctgctccgccgccggccaacgcatcgctnccccttggcagcnaggatgacagangcaccatttctgccacgtgagaggntcttcaagctgcaacatcatttccagaacatgaccaagcacacctacctgaaagggcgctacgatgtgatcacctccgttgccatccctcttgcattgctgcctccagcatgttccatgattgggcgtggagtttacaacatgtctccatggattg

SEQ ID NO: 6203 - DNA, 271 bp, Zea mays
  misc_feature: Incyte ID No: 700458558H1
  unsure 166-167, 211, 219, 234, 257, 265, 267: a, t, c, g, or other
gacaatggcaatggctcgggcaggttaagagcaacatcgtcacggggttcatggaacgctgcactcctttgggagttggcggcatagctcgtctgatatagggccttctagggaggacaacattctgaaacgctccagagacaatcaaatccgtctggcgggagcnncggggaccattcatcctccccgcaggaggcaatccaaggagacntcccccgnagccgtaccggctcncgtgcaccccgaggattaagcangaaggatntntttt

SEQ ID NO: 6204 - DNA, 129 bp, Zea mays
  misc_feature: Incyte ID No: 700458559H1
  unsure 54, 80, 127: a, t, c, g, or other
cctgcggcaactgcccgaccccaacgcccccggtcgagccaccgccgccgcctncctgctgctaccccacccccttcgtnccagcggcaagtgcccgctgaacgcgctcaagttcggcgtgtgcgcnat

SEQ ID NO: 6205 - DNA, 138 bp, Zea mays
  misc_feature: Incyte ID No: 700458560H1
tgtgaccctccctcagccgcgtcgcgtcgcatccttacgatccaaagctactctcttgctcgcagccatggcgaagaactacccgaccgtgaggccgagtacagcgaggctgtggagaaggccaggcgcaagtcccga

SEQ ID NO: 6206 - DNA, 212 bp, Zea mays
  misc_feature: Incyte ID No: 700458562H1
  unsure 2, 36, 38, 54, 69, 93, 100, 106, 110, 116, 119, 121, 138, 152, 160, 173,189, 196, 205: a, t, c, g, or other
cnatggggacacaggcacctctgctgcctgtgcttncncttctcctgggaatgncgtccggccaggtcntgttaccaggcgttcaactgggantcgtagnaacagngcgncggatngtntnacctactaatggggaangtccgacaacatcncctccgcnggcgtcacgcacntctggctcccgccgcngtcgcantcgtctccnacccaag

SEQ ID NO: 6207 - DNA, 103 bp, Zea mays
  misc_feature: Incyte ID No: 700458563H1
  unsure 25, 29, 36, 51-52, 69: a, t, c, g, or other
gctgaaactgctggccatgtgggcnagcnccgtttnccctaacgggcgaanntaagcgctcaacttccnagggcctaggcctacgagtaacgtagaaggaggc

SEQ ID NO: 6208 - DNA, 75 bp, Zea mays
  misc_feature: Incyte ID No: 700458565H1
  unsure 10, 42-43: a, t, c, g, or other
gccatttttntggaaacctctgcgccatgagagccaagtggnngaagaagcgaatgcgcaggctgaagcgcaaaa

SEQ ID NO: 6209 - DNA, 254 bp, Zea mays
  misc_feature: Incyte ID No: 700458566H1
  unsure 147, 160, 208, 214, 232, 241, 246, 252: a, t, c, g, or other
ggaccgagaaagataagaaaggcggtggtcaacttgtgtcctgaggtgcccgtagaagcccaaggacaagaaacaaggagaagagtagatctacatctactccaccgatgagcgcgtctcggttcatcaagtgcgtcaccgtggggnacggtgccgtcgnaaagacctgcatgctcatctcctacacatccaacatttccccactaantatgtnccaactgtgttcgacaanttcagtgcnatgtngtggtnga

SEQ ID NO: 6210 - DNA, 267 bp, Zea mays
  misc_feature: Incyte ID No: 700458567H1
  unsure 42, 49, 87, 93, 114, 117, 149-150, 171, 220, 229, 242, 245, 250: a, t, c, g, or other
aatgcgtaccctgcccccatcctcgggcctcgacgccccctnccccttncaccacctcgtacctcggcgcaggcacgcagccccacntcgctncctcttggtgtctctccagcngtnggcgtacctgcagtccagccgcctccaaccgnngtggcgcagacgccccacccngtcgcggaggaagaacaagaagggcattcatcggcaacccagggcgctntggtggttnaggaccgcctgtnagngggcnaaaagaacattctcctc

SEQ ID NO: 6211 - DNA, 161 bp, Zea mays
  misc_feature: Incyte ID No: 700458568H1
  unsure 67-68, 73-74, 76, 93, 109, 113-115, 122, 138, 158: a, t, c, g, or other
gagaaacgcgacggaacgcccagcacgggctgcacggcaggtccggcactacggcagcacatccttnncggtnncnccggccctaccgccgtnccagcacgacagcacntccnnngaccagntcccaggctcccaacntccggcggtacccagcagtntag

SEQ ID NO: 6212 - DNA, 261 bp, Zea mays
  misc_feature: Incyte ID No: 700458569H1
  unsure 137, 250: a, t, c, g, or other
ggaatgcttaaagtgataagtgcaatgttgcgggtctgtgataacgattctgaaaatccattacaatacatttgtggattaccggtgggtgtcagctttaaaatatctctgtggaacatatctggtcaccatcgacngtggctccgcatgaccattggtgaatctgtgcaacataccttcctagaattttctcgttttgaaggcaatgatgaggtgaggagtggctctatggctgttccttgactgctantccaaaggcag

SEQ ID NO: 6213 - DNA, 264 bp, Zea mays
  misc_feature: Incyte ID No: 700458570H1
  unsure 117, 122, 150, 160, 202, 236: a, t, c, g, or other
gctaaaggagaaggtgaacaacgcggtgctgttcgaccaggctacctgacgacaagctgctctctgaggtgcccaagtacaagcagatcaccccctaccatcctatccgagcgcctncaggntcaatggctaccctggctcggagggctntccaaggacntgatggcgcgtggcctcatccggttggtctcggttcactcangccagcagatctcacaccagggcaacaaatactnaaggatgggatccttgtttgcctatctg

SEQ ID NO: 6214 - DNA, 135 bp, Zea mays
  misc_feature: Incyte ID No: 700458572H1
  unsure 24, 55, 86, 99, 126: a, t, c, g, or other
acatctaccttttaaaaaaaatanaacagccagttccccctgtacaattgttctngttggggttggtgatggaccatgggacatgntgcaccagtttgntgacaatatacctgctcggtcatttgncaatttcca

SEQ ID NO: 6215 - DNA, 51 bp, Zea mays
  misc_feature: Incyte ID No: 700458576H1
  unsure 7, 40: a, t, c, g, or other
cgccgtncctttcctgtataataaaacctgcaaatccgtntctactcccgt

SEQ ID NO: 6216 - DNA, 267 bp, Zea mays
  misc_feature: Incyte ID No: 700458577H1
  unsure 111, 141, 149, 152, 242, 254: a, t, c, g, or other
cacgggcattgcgagacgttcgtaggcaacggttacgtgaagcgagcatacttcgtcgggcccctatcgttgtcgccgtcaccatcatcgccggtggcagccggcggcggncgcctaacggctcacggtgcatcgactggntggacaanaanccgccccagtccgtggtgtacttgtgcttcggtagcttgactacacgtctcagaggctcagtcacgtgagctagctcttgggctagaggnctccgcagaagncattcctttgggt

SEQ ID NO: 6217 - DNA, 264 bp, Zea mays
  misc_feature: Incyte ID No: 700458578H1
  unsure 32, 35, 144, 153, 158, 162: a, t, c, g, or other
aattcatcatccatccccatccccccatcgantcncagatctctattccccctactccctgtcctcactctctcgagcgcgttgtggcggatgtcctcgttcggcgcgtttcgatctccgggcctcgtcgcatcagttgcagcngccgccgtncgcancgcnagcatgagcagcgacgggggcgcgttcgcaaacgcggagaacctggagcatgcgcccggtactgaaccagacgctcgtcacttcggattccggcatctctcg

SEQ ID NO: 6218 - DNA, 113 bp, Zea mays
  misc_feature: Incyte ID No: 700458579H1
  unsure 16, 36, 107, 111: a, t, c, g, or other
tgtatgtgatctcacngatattccccgggagacagnggttagatttgtctgtcggagcccactgtgctgattagttcagtcacggagatctcttcctgcaaatatgntgtnac

SEQ ID NO: 6219 - DNA, 256 bp, Zea mays
  misc_feature: Incyte ID No: 700458586H1
  unsure 10, 29-30, 34, 77, 103, 117, 127, 149, 161, 173, 177, 184, 197, 203,213, 221, 234, 238: a, t, c, g, or other
attataacanaccctgagagccaaaatgnncganaatctgttcgcttcattcattgcccccacaatcctagacctanccgccgcagtactgatcattctattnccccctctattganccccacctcnaaatatctcatcaacaaccgantaatcaccaccnaacaatgactantcanactaacntcaaaacaaatgntaaccntacaaaacantatgggangagcctgatcttnatantagtatcttaatcatttt

SEQ ID NO: 6220 - DNA, 98 bp, Zea mays
  misc_feature: Incyte ID No: 700458587H1
  unsure 2, 11, 28, 46, 57, 71, 73-74, 96: a, t, c, g, or other
gncgaagccanctgccaagaaggccggncgccccgccaaggcggcnaagacgtcggncaaggccacgccangnnagaaggcgccggtggccaagangc

SEQ ID NO: 6221 - DNA, 175 bp, Zea mays
  misc_feature: Incyte ID No: 700458588H1
ggggaggcgccgacgccgagtttttgctccatcccgcatccaccgccagaatgtttctcacgaggacggagtacgaccgcggggttaacaccttctcgccggaggggcggctgttccaggtccgagtacgccatcgaggccatcaagttgggatccactgcgatcgggttgaaaa

SEQ ID NO: 6222 - DNA, 108 bp, Zea mays
  misc_feature: Incyte ID No: 700458591H1
  unsure 71, 106-107: a, t, c, g, or other
gtcataagaggttctgctagaggagtgatcaagtcagatactacgtttcacgcattatctgatgctggtancactgattcccgcaccactataaccacaagagcannt

SEQ ID NO: 6223 - DNA, 262 bp, Zea mays
  misc_feature: Incyte ID No: 700458593H1
  unsure 26, 30, 46-47, 62, 70, 84, 147, 187, 198, 200-201, 211-213, 215, 218,226, 228-230, 241, 244, 251-253, 258: a, t, c, g, or other
gcaatacttggtgcagattgcgaganattngtaattttgccactcnncagttttggcttccngttattangccatcatgtgtcnatgactggtgggaccatatgtgtctatgactggtggacctgatggtatattggcgaaacccancaatcataatggcaaaattaccaatgtctcaaaaaaaaanatagcaaattnannggggcgcccnnnancangcaacccngnnncaccggggaanttntccgggnnngtcancctg

SEQ ID NO: 6224 - DNA, 262 bp, Zea mays
  misc_feature: Incyte ID No: 700458594H1
  unsure 2, 40, 141, 159, 168, 171, 183, 221, 224, 228: a, t, c, g, or other
gntgcatgcacctgcaaacctagggcacaccattcacggnggatgcatttcggtatggacaagttgatgggtgctcggcctatttccttagccactttcatcatgaccattaacggtggattaaccaagagatggtgccanggccccatctattgttcngcacttcantgnacgcctagtgangatgtgcttgtcagtaaattccgagtatatctgtcctntgnagcntgataccgagtatgtcatagagggagtgacagtt

SEQ ID NO: 6225 - DNA, 133 bp, Zea mays
  misc_feature: Incyte ID No: 700458595H1
actgcgcagaccagacttcgctcgtaattcgtgcgcctcgctttcgcttttcctccgcaaccatgtctgacaaacccgatatggctaagatcgagaaattcgataagtcgaaactgaagaagacagagacgca

SEQ ID NO: 6226 - DNA, 258 bp, Zea mays
  misc_feature: Incyte ID No: 700458603H1
  unsure 2, 20, 26, 31, 42, 63, 67, 73, 84, 87, 89, 94, 102-103, 113, 116, 136,142-143, 157, 172, 176, 206, 211, 213, 229, 237, 244, 249: a, t, c, g, or other
ancggcgacgggaacgggangcggcncggcnggagattcgangcgatggcgttcacgatgcgngcantgaagntgcctccgaantcngnctcgntggagganncccggacacngcntcttcgatttcttcaagcangcatgnngctctatccccacngtcatggagatctanaacntcgacgacgttgtcacgccctctcagctcngctcnancatcgctaaggagatncgtaaaanccagaangtcancaaccccaa

SEQ ID NO: 6227 - DNA, 278 bp, Zea mays
  misc_feature: Incyte ID No: 700458605H1
  unsure 224, 243, 259-260, 263, 271: a, t, c, g, or other
gaaaaagaagaaatagggataccggagccgaactccggcggaccatctggtattctggtctggcactctggcgtgagaaaaggaaactgaattgaagcacagatcgatcgagagaggcgaacggcagtcggcaggcgagaaagaagtgctgacgactcgtttccgtcgcacgcactactactcgcccagtccgccgctctcccgcggatcttcacctccactcnattccgaggatctcatcancacgctttccggcgcnncgncggcggcncttcctt

SEQ ID NO: 6228 - DNA, 276 bp, Zea mays
  misc_feature: Incyte ID No: 700458607H1
  unsure 60-62, 67, 105, 241: a, t, c, g, or other
tcgaatccaacgtcctctcctctccgtacttcctccgcagctacccccatcacattcccnnnccctncgtcgacccctcctcctcgatctacaccggcgatcggnggcgagcgatggggtgggcgacgcggttcctggcggcggtgtgcttctttgctgcgggtgtcctcttcgtccccgaggctctccttggttccccctccggcgcaggcgccgtcaccgccgccaagctggcccacgncctctcctttgccacttcctggggcgccgccctct

SEQ ID NO: 6229 - DNA, 288 bp, Zea mays
  misc_feature: Incyte ID No: 700458608H1
  unsure 8, 11, 23, 28, 72, 76, 98, 112, 119, 137, 173, 194, 208, 236-237, 239,241, 243, 247, 249, 266, 273, 278, 282: a, t, c, g, or other
ctttctantanctcttagtaagnttacncatgcaagcatccccgttccagtggagttcatcctactaaatcnccangattcataagggacaagcatcnagcacgcagctttncagctcnaaacgcttagcactagcnacacccccacgggataacagccagtgattaaccttnagcattaaacgatagtttaantaagctatactaanccccagggttggtcaatttcgtgcccanncncngnggtncntacgattaacccaattnattagtngccgncgtnattttt

SEQ ID NO: 6230 - DNA, 267 bp, Zea mays
  misc_feature: Incyte ID No: 700458611H1
  unsure 41, 198: a, t, c, g, or other
aaggggtgcatggagctcttgtcaaggagcggagtcactgntaaaggtaagcgggcagttgtggttggtcgcagcaacatcgtcgggctacctgtatccctgctccttctgaaggcagatgcgaccgtatctgttgtgcactcgcggacccctgatcctgaaagcattgtacgcgaaccgacatagtcatcgcggcanctgggcaggctatgatgatcaaaggtgactggatcaagccaggtgctgcggtcatcgatgtcgggacga

SEQ ID NO: 6231 - DNA, 269 bp, Zea mays
  misc_feature: Incyte ID No: 700458612H1
  unsure 2, 21, 49, 56, 86, 88, 138, 171: a, t, c, g, or other
gngccagcgagcacgcgaggnaccctcggtcccaagggatccgactgcnacaaggncgctgtgatcggtgacaccattggtgaccncntgaaggacacctccggcccgtccctcaacatcctcatcaagctcatggangaggagtccctcgtgtttgcccccttctttgcnacccagggtggcctgctcttcaagtacctgtaaaagggacaacaccaagcacacagcagaagtatagatctcccgaccgacgtggacaatatcgaata

SEQ ID NO: 6232 - DNA, 269 bp, Zea mays
  misc_feature: Incyte ID No: 700458614H1
  unsure 8, 50, 81, 170, 173, 228, 236, 243: a, t, c, g, or other
ggtcaggntcaatggcgacctcgacctctggttccggtacctcgagttcngccgcgacaagcgacacggcaggatgaaganggttctggcacaagctattcgcttccatcccaaggttcctgggctttggatctatgcagcagcatgggaattcgatcagaacctgaacnttncggcggcacgtgcactgatgcagagcggtctcaggtcttgccctcagtcagaggntatgtggntcgagtntcttcgcatggagcttacctacctta

SEQ ID NO: 6233 - DNA, 269 bp, Zea mays
  misc_feature: Incyte ID No: 700458615H1
  unsure 2, 24, 80, 83-84, 98, 130, 170, 176: a, t, c, g, or other
gntcattctatttccccctctatngatccccacctccaaatatctcatcaacaaccgactaatcaccacccaacaatgantanngcaactaacctcanaacaaatgataaccatacacaacactaaaggncgaacctgatctcttatactagtatccttaatcatttttnttgccncaactaacctcctcggactcctgcctcacttcatttacaccaaccacccaattatctataaacctagccatggccatccccttatgagcgggc

SEQ ID NO: 6234 - DNA, 99 bp, Zea mays
  misc_feature: Incyte ID No: 700458616H1
  unsure 2, 32, 73: a, t, c, g, or other
gncgaagccagctgccaagaaggccggccgcnccgccaaggcggccaagacgtcggccaaggccacgccaggnaagaaggcgccggtggccaagaagcc

SEQ ID NO: 6235 - DNA, 277 bp, Zea mays
  misc_feature: Incyte ID No: 700458618H1
gggaagataccgagtcaggctcatacttcgcaatgaaatccttagtgatggaagagctcaaggcatttttccgtccagagttgctcaatagaatcgacgagatggttgtgttccgtcctctggagaagactcagatgctggccattcttgatatcatcctaaaggaagtcaagggccgacttttggccctcgggataggtttggaggtgtctgatgcaatgaaggacctgatatgccaagagggctacgacaaaagctatggcgctcggcctctgag

SEQ ID NO: 6236 - DNA, 274 bp, Zea mays
  misc_feature: Incyte ID No: 700458619H1
  unsure 125, 235: a, t, c, g, or other
agaattgcttgcacaaggtgtgcaacaaagcagataccatgaaaaaactcctgaacaggaaagacttgagaggaggaggcaaatgccttaccatatgcatataaacctggagcttttggaagccncacacttgatctgtgcgatgctgattgaagtccccaatatggctgccagcacctatgacaagcggaggcctatgagcaaaacattccgaaggcttctcgaagtgagtganaggcagacatttgttgggccgcctgagaatgtgagggac

SEQ ID NO: 6237 - DNA, 268 bp, Zea mays
  misc_feature: Incyte ID No: 700458622H1
  unsure 5, 26, 54, 199, 213, 245, 259: a, t, c, g, or other
ctttnaaccagtgaaattgacctgcncgtgaagcaggcgggcatgacacagcangacgagaagaccctatggagctttaatttattaatgcaaacagtacctaacaaacccacaggtcctaaactaccaaacctgcattaaaaatttcggttggggcgacctcggagcagaacccaacctccgagcagtacatgctaanacttcaccagtcanagcgaactactatactcaattgatccaataanttgaccaacggaanaagttacct

SEQ ID NO: 6238 - DNA, 276 bp, Zea mays
  misc_feature: Incyte ID No: 700458624H1
  unsure 66, 75, 150, 155, 181, 184, 229, 237, 255, 265, 274-275: a, t, c, g, or other
gggcgtcctctctctctctcgtggcgacgactgggcgacctccccgcccccgctgctctacgccantcgccaggngcccagatcttcgtcgggcccttcgccgaagagcagccaacaggttgccggtctgcgagttgaatcatggcggancactnggcttcgatcttcggcactgagaagnacngggtcaactgccctttttacttcaagattggggcctgtcgtcatngggatcgntgctctcgtctgcacaanaggccaactntatcaccannt

SEQ ID NO: 6239 - DNA, 275 bp, Zea mays
  misc_feature: Incyte ID No: 700458625H1
  unsure 2, 19, 229, 255, 274: a, t, c, g, or other
gnactcgtgaaagaacagngccgccactgaggaaaccctagcgacggcggcgtgctaccggtgacattgtccccctcggcccctccatccctgacgcagcggcgccagcctgcaggaagccagcccctattcgagacaaggtcgatctttgctgccttggcgagcttcagccgaatcaaggtcgagcatggcggcaggccagtaaatagagcaacacaaaacccttcanattaatggagacctctgcagcaaccncgacccggccgccacaccnt

SEQ ID NO: 6240 - DNA, 268 bp, Zea mays
  misc_feature: Incyte ID No: 700458628H1
  unsure 185, 216, 256, 261-262: a, t, c, g, or other
ggaataataaaggaggacccagaaactaaaaagccacgggtgaagatttatactgataaggaaaccggcaggaagaagggtgatgccttggtaacatatttcaaggaaccttctgtagctttagcggttcaattgttggatggaacatcattccgttctggtggtaagactcctatgtctgtaantccagccaaatttgagcagaaaggcgatgtnttcatttcaaagaaaagtgacaagcaaaagaaaaggaagntaaannggttgc

SEQ ID NO: 6241 - DNA, 265 bp, Zea mays
  misc_feature: Incyte ID No: 700458630H1
gctgcatcaggggcacaggatcaggcagaaaccgaccacatggctagcggatgctacagatcagcagaaactacggcgaattttacaaataatgctatgtctcagtcccaacctcaatggaccggtccgtcccctgtggatgactgtgcagtgaacagtgagacgcttaacaaccagcagttggtgattgatgaaggaacaatcagagtgtccagtaactattcccaagagttgcttaactcgttgactcatgcccttcaaagct

SEQ ID NO: 6242 - DNA, 135 bp, Zea mays
  misc_feature: Incyte ID No: 700458635H1
  unsure 27, 122-123, 133: a, t, c, g, or other
ggcaaagcaaatcctatcctatcagtnggatcgtgcgtctcgtcgagcctcgatcctatccccgccacgccgatccctcgtcggtcgtccgaatctggtggactatctccatcgccgggcgnncatttttggncc

SEQ ID NO: 6243 - DNA, 121 bp, Zea mays
  misc_feature: Incyte ID No: 700458637H1
  unsure 20, 64, 87: a, t, c, g, or other
gcgtccgtgagcgcttcctnccctgtgcactgatcctggccccctcttatttattctacatccntggcaacccacttgcactgaaanaggcttttattaaatagaagaaatgaggtttctt

SEQ ID NO: 6244 - DNA, 170 bp, Zea mays
  misc_feature: Incyte ID No: 700458638H1
  unsure 3, 16, 73, 104, 134, 151: a, t, c, g, or other
gtntccctaaatcagncatgtcaagcaatcagccaacgtggtgtatttctcattcaatattttagtgtgaatngagacactgagataaagacatcgtggcaganataaatggggatacagttaaatgtagcaantctgagtttcattttgncccactgtagcaaaattat

SEQ ID NO: 6245 - DNA, 273 bp, Zea mays
  misc_feature: Incyte ID No: 700458639H1
ggaaaattgccatatgaacaatgagaaaatgcttctaaagcaaaatgtggatgagcaacagatggagaacgagcagatgcttatagatcaggtcactagtgttcaagttttggatattcaccatgtgcacgatgaacagttactggtaggtcatgctgcagatgatcatcaccaaatggaaccaaatcccatggctttttctttgggtgttcatgatctggataactactatctgagcagcaagcaaatacttctgtataatgatgtaggagg

SEQ ID NO: 6246 - DNA, 267 bp, Zea mays
  misc_feature: Incyte ID No: 700458641H1
  unsure 2: a, t, c, g, or other
gngacgacgagatgggcgacttcggcggcgacgagggcccggtgatgaaggtgggcgaggagaaggaggtcggcaaggaggggctcaagaagaagctgctcaaggagggcgagggctgggagactcccgaggtcggcgacgaggttgaagtgcattacacgggcacgctccttgatgggacaaaattcgactcaagccgtgatcgtggagaacccttcaagttcaagcttggacaaggtcaagtgataaaggttgggatcaaggaat

SEQ ID NO: 6247 - DNA, 134 bp, Zea mays
  misc_feature: Incyte ID No: 700458642H1
  unsure 2, 24, 69, 133: a, t, c, g, or other
gnacacctcagagccccgcaaaanccactgaccggaggcaaaaggcagtggggctgggggtagttttcnatggtcacagagaactagtggtggctctgagaaggggaggacctctgggctttgattccatctnc

SEQ ID NO: 6248 - DNA, 265 bp, Zea mays
  misc_feature: Incyte ID No: 700458643H1
  unsure 147, 152, 263: a, t, c, g, or other
gccgtgttctgcaacatgagccaatacctctgcatcgggcggttctcagcgacctcgttccaggtcctgggccacatgaagaccgtgtgcgtgctgatcctgggctggatcctgtttgactcggccctcaccgtgaagaacatcctngggangctgctcgccgtgatgggcatggtggtctacagctgggccgtggaagcggagaagaaggcggcagccccgatcccccggaacaagggcggcatgctcgacggcgaggattncc

SEQ ID NO: 6249 - DNA, 264 bp, Zea mays
  misc_feature: Incyte ID No: 700458644H1
  unsure 2, 31, 68, 77, 96, 132, 151, 217: a, t, c, g, or other
gnaccatttcataactttgtcaaagttaaantataggctaaatcctatatatcttaatggcacatgcngcgcaagtnggtctacaagacgctactncccctatcatagaagagcttatcacctttcatgatnacgccctcataatcatttnccttatctgcttcctagtcctgtatgcccttttcctaacactcacaacaaaactaactaatactancatctcagacgctcaggaaatagaaaccgtctgaatatcctgcccgc

SEQ ID NO: 6250 - DNA, 264 bp, Zea mays
  misc_feature: Incyte ID No: 700458645H1
  unsure 160: a, t, c, g, or other
ggctgcggttccatctaaagatctgatttcttccataaagatcttatattctaaaacaaaggatgttgagttcctttttgcaatcttggttcatctaccaaaagatgaggtcctgcctgtgttccccagtattgttaatcttccaatagacaagtttcanagtgccatttcccgaatcttgcagggatcacctcggaatggcccttcacttgatccatcagaaattttaattgcaattcatgtaatagctcctgataaggaagg

SEQ ID NO: 6251 - DNA, 130 bp, Zea mays
  misc_feature: Incyte ID No: 700458646H1
  unsure 54, 67, 94: a, t, c, g, or other
ggtgttctggccgaggtacttttaccgcgtccataagctgaagcagcaggaggncgccagggcgaantcgtggcagcgtgtgattgcgcaggangaggacgaggacttgagctgggaggtcgatgacgac

SEQ ID NO: 6252 - DNA, 264 bp, Zea mays
  misc_feature: Incyte ID No: 700458648H1
  unsure 16, 20, 60, 263: a, t, c, g, or other
ggcatcaggaacaganaggngtccaagtacctgtatcacagccgcctacgcccacctagnggccagtcccagagccgcatggcagacagcttaaatgacttcaggagagccctgggcctgtgctggctgctccttccctgccaccgctgctgcttctgactttgcctctgtcctgcctggtgtggagggctctgtctgttgctgaggaccaaggaggagaagagacctttgctgccccatcatgggggctggggttgtcactng

SEQ ID NO: 6253 - DNA, 271 bp, Zea mays
  misc_feature: Incyte ID No: 700458651H1
  unsure 84, 90, 111, 115-116, 137-138, 176, 191, 248: a, t, c, g, or other
acccctcctcccaccatggtaccctgtaggagccctgtatgacatctgagcgtggtggaggtaggagggttgccagttgcagtnaccctnccacagaggcagggtcagtgncagnngtcgctttggttccgcttccnngggccacagaacggaacacagcataggttctgcagcangagccgcagtggcangatggagggtgcgaagggcaaggagtgcactgctgggcattcctggccaaccccggncctctggtgctgcttcctgtgaa

SEQ ID NO: 6254 - DNA, 275 bp, Zea mays
  misc_feature: Incyte ID No: 700458652H1
  unsure 84, 139, 166, 219, 247, 250: a, t, c, g, or other
cgcgtccaagtacggcacccacgcggagcttcaagtcgctcaccgcgggcgttccacgccaagggcgtccagtgcgtcgccgangtcgtgatcaaccaccgctgcgccgactacaaggacggccgcggcatctactgcntcttcgagggcggcacgccgatcagcngccttcgactggggccccgacatgatctgcagcgacgacacgcagtactccancgggcgcgggcaccgcgacacgggggcnganttcgccgccgcgcccgatatcgaca

SEQ ID NO: 6255 - DNA, 269 bp, Zea mays
  misc_feature: Incyte ID No: 700458653H1
  unsure 150: a, t, c, g, or other
ggtgatctacgaagaggatggattccaggatctccctcctctgcgccctcgtcctcgcctcctccctcctgcactgcgccagatccgacggcaatgacgcgcagtcctcaagggcatcaacagctacaggtcctcgctcaaggtcccggngctggccgagaacaagaacgcggcgtgcctggccgagcagctcgcgaggcagttcaagggccaggagtgcaccaacacgacgggcgccaacaccgtcatcggcaccgagcagcagttcc

SEQ ID NO: 6256 - DNA, 268 bp, Zea mays
  misc_feature: Incyte ID No: 700458654H1
  unsure 3, 12, 36, 47, 53, 58, 61, 69, 115, 205, 214, 219-221, 229, 244, 256,258, 264: a, t, c, g, or other
ggngtggagaanggattccctcttctttcccttctnagcagcatgcntcccantctanaangaggtcantgctgaggtgaaggcagctggggcttcatggattcagtttgatgancccactcttgtcctcgaccttgattctgacaaattggcctgcattctctgctgcatacgcagaacttgaatctgtactttctggattgantgtgctgtngagannnactttgcnggtgttcctgctgantctacaagaccntntatccntggg

SEQ ID NO: 6257 - DNA, 269 bp, Zea mays
  misc_feature: Incyte ID No: 700458655H1
  unsure 23, 221, 224-226: a, t, c, g, or other
gaaaacctcacaaaaccctcgcncgctccccaccaccccgccgagccgccgcctgtaccagctgcgtcaagatgagtcggcaccctgaggtgaagtgggctcagaggatcgacaaggtttacatcactgtacagttacctgacgcaaaggatgctaaggtcaatttggatccagatggtgtcttcacattctctggcagtgctggtacaaacttgtatganttnnnactagatctgaatgacaaagtaaacgttgaggctagcaaaatt

SEQ ID NO: 6258 - DNA, 262 bp, Zea mays
  misc_feature: Incyte ID No: 700458657H1
  unsure 4, 20, 24, 30, 37, 46, 51, 92, 99, 105, 118, 122, 173, 180, 185, 205,215, 232, 255, 261: a, t, c, g, or other
ggancctcagtctgcatgtnactnttatgntagttantccaaattnaagangaagcagtattaacatcaattgatcgacacaaagtaatttntaatttnattcancatttcacatgtntgtncttggtcttcccattaacctttgccagtgttatgattgtataaattttttnaaatgcnggttnaacaggaatgctaaagcttnaaaagtttancagtctaaaacattttngctttatgcaactgcagaataanattttnt

SEQ ID NO: 6259 - DNA, 102 bp, Zea mays
  misc_feature: Incyte ID No: 700458659H1
  unsure 2, 60, 69: a, t, c, g, or other
gnacactgcacaccttcactcccgacatcctaagactatggcggcgctgagctggatccngctccggcncgccccgtgtctgccattgcttcattttgctgc

SEQ ID NO: 6260 - DNA, 263 bp, Zea mays
  misc_feature: Incyte ID No: 700458660H1
  unsure 2, 30, 46, 186: a, t, c, g, or other
gnacaagacgctacttcccctatcatagangagcttatcacctttnatgatcacgccctcataatcattttccttatctgcttcctagtcctgtatgcccttttcctaacactcacaacaaaactaactaatactaacatctcagacgctcaggaaatagaaaccgtctgaactatcctgcccgcnatcatcctagtcctcatcgccctcccatccctacgcatcctttacataacagacgaggtcaacgatccctcccttat

SEQ ID NO: 6261 - DNA, 91 bp, Zea mays
  misc_feature: Incyte ID No: 700458661H1
ggtgcacatggaggagctctccaacaagggctctggcaccaagccttgctttcggctgtgcctggatgcggtagctggattcgttctcatc

SEQ ID NO: 6262 - DNA, 267 bp, Zea mays
  misc_feature: Incyte ID No: 700458668H1
  unsure 2, 139, 182: a, t, c, g, or other
cntcaacaagatcctgctggagatcgcacagatccaagctcctgcggcgctgctcaaggcgagctcccccgaggagaccgtcgccgccatggtgacagggccagccaagtcatgactgcatgtatgtagtgtacacganaagagaaatgagtaagcacataggttgcaaaagggagggggangaggtccggggattaactgaagccaagctgtgtcggataataatgtagggagttcaaagtgttctttcttctcctgtgatcagac

SEQ ID NO: 6263 - DNA, 271 bp, Zea mays
  misc_feature: Incyte ID No: 700458669H1
  unsure 2, 13, 16, 149, 269: a, t, c, g, or other
gntctaccgtggnccnttacctcaaattctacaatgctataagagaggcctatccagacattcagatgatttcaaactgtgatggttcatctagaccacttgaccatcctgcggatttgtatgatttccatgtctatactgattctaanactttgtttaacatgaggagcacatttgacagaacatcacgtagtggaacctaaggcctttgtgagcgagtacgctgtctggagaagtgacgcgggtagaggcagtcttcttgcttcgtngg

SEQ ID NO: 6264 - DNA, 266 bp, Zea mays
  misc_feature: Incyte ID No: 700458670H1
  unsure 68-69, 76: a, t, c, g, or other
gggagagggaatcctttgcggagaaacttagcaaggttgtttaaaactaagcttgctcttagtcttannggctgtntgtttaccccatggattatataatctggattatttttggaggattatataatctggattatataatctgagtagtcctgtttgtttacccagattattgagttgttaataggattcttttgtatgaggaagacaagaatgccctctatatttgtactaggttgaaactcatatatatacaaaaataattc

SEQ ID NO: 6265 - DNA, 268 bp, Zea mays
  misc_feature: Incyte ID No: 700458672H1
  unsure 31, 44, 47-48, 56, 58, 107, 110, 136-137, 141, 231, 250: a, t, c, g, or other
ggtccaattaactagctttgacaacattcanaaaagagtaatanacnncgccttantnttaataatcaacaccctcctagccttactactaataattattacatttngantaccacaactcaacggctacatagannaatncaccccttacgagtgcggcttcgaccctatatcccccgcccgcgtccctttctccataaaattcttcttagtagctatcaccttcttatnatttgatctagaaattgcnctccttttacccctacca

SEQ ID NO: 6266 - DNA, 52 bp, Zea mays
  misc_feature: Incyte ID No: 700458674H1
ggcaggcaccgctggcagctggatgaaatctagtggatcttctgttgtgccc

SEQ ID NO: 6267 - DNA, 142 bp, Zea mays
  misc_feature: Incyte ID No: 700458675H1
  unsure 110-111: a, t, c, g, or other
ggcgagccccaagcgccttctccgcaccagggaagccccacccaccagaagccaagatgtccagcaagcgggccaaagccaagaccaccaagaagcggccacagcgggcnncatcggatgtcttcgtaatgtttgaccagtc

SEQ ID NO: 6268 - DNA, 255 bp, Zea mays
  misc_feature: Incyte ID No: 700458676H1
  unsure 2: a, t, c, g, or other
gnccgccctgtacctccaagtcagtatcgtgagccaggctctgatcttcgtcacccgttcccgtagctggtcttcgtggagcgccctggtctgctcctggtcaccgcgttccgctcgctcaacttgttgccaccttcctcgctgtctacgccaactggggcttcgccaggatcaagggtatcggctggggctgggcaggtgtggtctggctctaagcatcgtcttctattccccctggacctgctcaagttcttc

SEQ ID NO: 6269 - DNA, 93 bp, Zea mays
  misc_feature: Incyte ID No: 700458677H1
  unsure 7, 35, 60, 75, 82: a, t, c, g, or other
ggatgcnacactcattttcaactctttaacatganactgttcaattcttaacacattgtnactttaatatatgtntaaagangtattactgtt

SEQ ID NO: 6270 - DNA, 259 bp, Zea mays
  misc_feature: Incyte ID No: 700458678H1
  unsure 206, 245, 247, 258: a, t, c, g, or other
ggcgaggagcgggagcatgagtcccagcaggttaaggaggcagtccacttccaaggctaccgagacaagagcaggcaacgccaagggctacagaagcaaggggtgggaacgcgacactcggagataacaacgtggctgatgagctcactctcaaatgcgcatggccgattcataacaggaatgcatccacagggaagaggccggcngggagctcgaaggtcaggaatcatcccgagccgctacancntcacgcccggnt

SEQ ID NO: 6271 - DNA, 257 bp, Zea mays
  misc_feature: Incyte ID No: 700458679H1
  unsure 34: a, t, c, g, or other
ccaactctccgatctccaggaatccgcggctgangcgccggcgatggcggctcccatggtcgacgccgaatacctgcgccaggtcgacagggcgcgccgccacctccgcgccctcatctccaacaagggatgcgccccgatcatgctccgcctcgcatggcatgatgctggaacttatgacctgaagacaaaaactggtggtgcaaatggttcgattagatatgaagaagagtacactcaggttcaaatgctggttt

SEQ ID NO: 6272 - DNA, 268 bp, Zea mays
  misc_feature: Incyte ID No: 700458683H1
  unsure 41, 73, 111, 171: a, t, c, g, or other
ggaacatctgatactcctgatgatgctattcgatcatccantatcgcccaatgcttcggtactacctctaatngatgacacggctgtaaggatggaaactttgccaaccanaacgacacctgtaagggtgaaaattttgtcaaccagaaaaatgtcacaatgtaccaatcnaatttgaccatggaacctatacctcgagctcaaataaatgtgggattgtttcattcttcctgttcaatgactcctggaaatcaaggtttagggcacc

SEQ ID NO: 6273 - DNA, 92 bp, Zea mays
  misc_feature: Incyte ID No: 700458684H1
  unsure 34, 41, 69, 73, 76, 84, 88, 91: a, t, c, g, or other
accagcttgccaaatctctaaccctaggtgcagnggcgganatggcccccaagcgctcggttccatctncgcngcntccgctcncggntgnt

SEQ ID NO: 6274 - DNA, 266 bp, Zea mays
  misc_feature: Incyte ID No: 700458687H1
  unsure 44: a, t, c, g, or other
tggagacatacactgaggatgtttccagtgaaataatgaaaganatgcaggccaagcctgaccttatcattggcaactacagcgatggcaacctagtcgccactctgctcgcacacaagttgggagtcactcagtgtaccatcgctcatggccttggagaaaaccaaataccccaactcggacatctacttggacaagttcgacagccagtaccacttctcttgccagttcacagctgaccttattgccatgaaccacactgattt

SEQ ID NO: 6275 - DNA, 173 bp, Zea mays
  misc_feature: Incyte ID No: 700458688H1
  unsure 2, 18, 33, 54, 114, 136, 164: a, t, c, g, or other
gnaggggccctctcagcnctcctaatgacctcnggcctagccatgtgatttcanttccactccataacgctcctcatactaggcctactaaccaacacactaaccatataccantgatggcgcgacgtaacacganaaagcacataccaaggccaccacacacnacctgtcca

SEQ ID NO: 6276 - DNA, 125 bp, Zea mays
  misc_feature: Incyte ID No: 700458689H1
  unsure 2, 22, 36: a, t, c, g, or other
gngagtctcactgacaagagcnagctcgatgcgcanctgagcttttcatccaccttgtcccagacaaggccacgaacacgctctccatcatcgacagcggcatcggcatgaccaagtccgacctt

SEQ ID NO: 6277 - DNA, 92 bp, Zea mays
  misc_feature: Incyte ID No: 700458696H1
  unsure 86, 90: a, t, c, g, or other
gctgatgcaggataagaggtcgaaacagcagcaggtccaaaagcaggtctgggacagtaggacccccatttctgtcactggaagcnagcnaa

SEQ ID NO: 6278 - DNA, 267 bp, Zea mays
  misc_feature: Incyte ID No: 700458802H1
  unsure 45: a, t, c, g, or other
cccaccatcaccccccacgaaaaaagcgaaccgagggacaggaangatcggcgcgttccggccggagatgaggggcggatccagaccggccccggtacgtcctgtttctcaccgctgcgtccgggatctgcgcccaattcaccgcagtgctagctggtgatccacaaacatccaacgatgacaaggaggtgaagctcagccaaaggggggccataccggcaaaacagttttgttcgtcctcctaggagtggcggctgtcattctgtt

SEQ ID NO: 6279 - DNA, 264 bp, Zea mays
  misc_feature: Incyte ID No: 700458804H1
  unsure 10, 18, 101, 211, 262: a, t, c, g, or other
tggtcacctntgtatgtngagtccaaccttggtttgatgtcgattggtttcatgctgcctaatccagacgatgctgtcatatggaggggtccccgcaagantggactgatcaagcagttcttaaaggatgtcgattgggggagattgactatcttgttgtggacgctcctccaggaacatctgatgagcacatctcgatcgtgcaataccntcaagccacaggaatcgatggcgcgataatcgtcacgactccgcagcaggnct

SEQ ID NO: 6280 - DNA, 266 bp, Zea mays
  misc_feature: Incyte ID No: 700458806H1
  unsure 44: a, t, c, g, or other
ctttttcaggaactgcttgctttggaagagcatattggctcagngactactgcccttactgaagagcaatttaccaagtgtgtaaaccaaagtgtgtatgaagcaagaaattcttatagagatgtaagcaagattcgcagcagatgatgtgaaatgtagcgtatgtcaggtatttttcactctagtatttcaatgtttaagtatcgatgaattgaaattactagccttgttcggttgcgtctggatcaaagactattggaggaggg

SEQ ID NO: 6281 - DNA, 267 bp, Zea mays
  misc_feature: Incyte ID No: 700458807H1
  unsure 47, 77, 98, 174: a, t, c, g, or other
gctgcgcacctgcaagcctcgagtggagctcttccacggccgcggtngagatggcggcgaatctggaggacgtgcantcactggatctgatgcacganctgctccgccgcatgaagtgcagctccaagcccgacaagcgcctcatcctcatacggtccacctggctctggaaanggaactcagtctcctattatcaaggatgaatattgcttgtgccatttagccactggtgacatgctgagggctgctgtggcggccaagacacct

SEQ ID NO: 6282 - DNA, 263 bp, Zea mays
  misc_feature: Incyte ID No: 700458810H1
ggaggtgcaggttttccttctggtctcaaatggtcctttatgcccaaggtttcagatggacgcccttctcatcttgtcgttaatgctgatgagagtgagcctggaacttgcaaagatagagaaatcatgcgccatgacccccacaagcttctggaaggatgcctattgctggagttggaatgagggcatcagctgcttacatctacattagaggtgaatacgtgaatgagcgtctcaacctgagaaagctcggcaggaagcgt

SEQ ID NO: 6283 - DNA, 266 bp, Zea mays
  misc_feature: Incyte ID No: 700458812H1
gtttatgtagcttacctcctcaaagcaatacactgaaaatgtttagacgggctcacatcaccccataaacaaataggtttggtcctagcctttctattagctcttagtaagattacacatgcaagcatccccgttccagtgagttcaccctctaaatcaccacgatcaaaagggacaagcatcaagcacgcagcaatgcagctcaaaacgcttagcctagccacacccccacgggaaacagcagtgttaacctttagcaataaacg

SEQ ID NO: 6284 - DNA, 268 bp, Zea mays
  misc_feature: Incyte ID No: 700458813H1
cgcattcgttccaactcctgagcactttctcctcgtccccgacaagccaatcgaagccgagatacggccatggactccaccggcaccggagcagggggtaaggggaagaagggagcggccgggcgcaaggtcggcgggccaaggaagaagtcggtgtcgaggtccgtgaaggccgggctccagttccccgttcggccgcatcgggcgctacttgaagaagggccgctacgcgcagtgttcggcaccggcgcccccgtctactcgccgt

SEQ ID NO: 6285 - DNA, 271 bp, Zea mays
  misc_feature: Incyte ID No: 700458814H1
  unsure 12, 26, 58-59, 186, 188: a, t, c, g, or other
tccacatcattnttaaactaatgttnttctatattaacattattatggatatttgggnntcataggccacacacaggtgtgctgcgcgggaagccccatgctccaatcaaagggatttttagtagtgcctctaagcaagcaccgatgagtcagtcccacgtattttcttttttgtcagtattgttngngaaggagacatgccgggatgtgtcatcgtgccaaataccacatttcctgttggcacagtttcacagaagtaaacataagcatg

SEQ ID NO: 6286 - DNA, 271 bp, Zea mays
  misc_feature: Incyte ID No: 700458815H1
  unsure 8, 55, 57-58, 111, 227: a, t, c, g, or other
agagggangacgactttcctcctgtgagccaatgaggccagctggactacgccgngnnaactgggagaggcgcgggactcgcccgttccgcggaacgccgggaaggggtcncctcctgatgaagtttccggttccggtgtcagcggcggttgaattgccatggcaatgcggtgggcgcgcgcttgtcgtgttggtctcttgggaggtaacggggtaggccgggcggntatccgcctctcccagcttaggtgagcgtccccgggcgcctccg

SEQ ID NO: 6287 - DNA, 276 bp, Zea mays
  misc_feature: Incyte ID No: 700458816H1
  unsure 59, 111, 115, 205, 262, 264, 267: a, t, c, g, or other
ccaagcctacgttttcacacttctagtaagcctctacctgcacgacaacacataatganccaccaatcacatgcctatcatatagtaaaacccagcccatgacccctaacntcgngccctctcagccctcctaatgacctccggcctagccatgtgatttcacttccatccataacgctcctcatactaggctactaaccaacanactaacccatataccaatgatggcgcgacgtaacaggagaaagcacataccaaggcnancanacaccactg

SEQ ID NO: 6288 - DNA, 262 bp, Zea mays
  misc_feature: Incyte ID No: 700458823H1
  unsure 98, 131-132, 254: a, t, c, g, or other
gcagctgctcctgccgcatggttacccgtgcaccgagcacaccgttcaaacctatgatggctttcttttgtctcttcagcatattccacatggcaganatggaattgcagataatactggacctccagttnntcttcagcacggtcttttccagggtggagatacatggttcataaactccaatgaacaatcacttggatatatccttgctgacaatggttttgatgtttgggtcggaaatgttcgtggcacanttggagta

SEQ ID NO: 6289 - DNA, 265 bp, Zea mays
  misc_feature: Incyte ID No: 700458824H1
  unsure 28, 34-35, 50, 72, 74, 94, 109, 115, 118, 123, 191, 201, 208, 230, 239,254, 261: a, t, c, g, or other
gtctacaagacgctacttcccctatcanagaagnncttatcacctttcangatcacgccctcataatcattntncttatctgcttcctagtccngtatgcccttttccnaacacncanaacanaactaactaatactaacatctcagacgctcaggaaatagaaaccgtctgaactatcctgcccgccatnatcctagtcntcatcgncctcccatccctaacgcatccnttacataanagacgaggtcaacgntccctcnctta

SEQ ID NO: 6290 - DNA, 261 bp, Zea mays
  misc_feature: Incyte ID No: 700458825H1
gccgtgttctgcaacatgagccaatacctctgcatcgggcggttctcagcgacctcgttccaggtcctgggccacatgaagaccgtgtgcgtgctgatcctgggctggatcctgtttgactcggccctcaccgtgaagaacatcctcgggatgctgctcgccgtgatgggcatggtggtctccagctgggccgtggaagcggagaagaaggcggcagcccgatcccccggaacaagggcggcatgctcgacggcgaggacg

SEQ ID NO: 6291 - DNA, 263 bp, Zea mays
  misc_feature: Incyte ID No: 700458826H1
  unsure 2, 7-8, 19, 26, 41, 45, 119, 227, 250, 253, 258: a, t, c, g, or other
cncgagnnagcccatgggngatgccncagccgagatgcgcnaganaagggaccgctatctcgcagacctaacaagggcaaacaattaagtgatcatatatgtaactgatcgataggggncaagttttgcactctatttatgtattttagacatacagtgtgctgctgaactggcttggtgccctgcccccaggccccagcattcccgagactaccaatatgagcacnacgtttgttttcattagaacttnggnttcantgcag

SEQ ID NO: 6292 - DNA, 262 bp, Zea mays
  misc_feature: Incyte ID No: 700458827H1
  unsure 61: a, t, c, g, or other
agagagaaagcccatgggtgatgccgcagccgagatgcgcaagataagggaccgctatctncgcagacctaacaagggcaaacaattaagtgatcatatatgtaactgatcgataggggacaagttttgcactctatttatgtattttagacatacagtgtgctgctgaactggcttggtgccctgcccccaggccccagcattcccgagactaccaatatgagcacaacgtttgttttcatagaactttggtttcatgcag

SEQ ID NO: 6293 - DNA, 266 bp, Zea mays
  misc_feature: Incyte ID No: 700458828H1
  unsure 59, 77, 182: a, t, c, g, or other
accaaaagcatcccacacatctgctaataaggatggctgccctaacacaaactacaganggtcctcgcctcggcgancaggagatgaagaagatgtctccctccttccatccaactctgtggggagatttctttctttcttacgaggctccgaccgaggcacaggaagctcaaatgagaganaaggctggagtgctaaaggaagaagtgagaaacatgattaaaggttcacatgatgtgcccgaaatagtggaccttattatcacc

SEQ ID NO: 6294 - DNA, 264 bp, Zea mays
  misc_feature: Incyte ID No: 700458829H1
  unsure 56, 78, 85, 118, 129, 136, 146, 191: a, t, c, g, or other
cgcaaatgatgatttggtatttcttcgcattgtttctctacccaagggccgggggntactttcacgctatatcaaccncatggtncctggtagcgatcttgcaaggatagtttgcatngcagtattcangcacctnaggttgtgcntggaaatctgccctccgatgacggcgcagtggagacagtaactanactggctagcgctgtagcatcatgcattcgtgggatggacttaagtggcctcagtgcttgtctcgcagcattg

SEQ ID NO: 6295 - DNA, 270 bp, Zea mays
  misc_feature: Incyte ID No: 700458830H1
  unsure 9, 25-26, 37, 39, 54, 57, 90, 126, 129, 158, 162, 177, 182, 191, 193,222, 251, 256, 259-260, 266, 268: a, t, c, g, or other
gcgataganaacccaaacggagagnnacaatcgagananatggcaaactgttgnggngacgtcgtggacaattacaagctagacacaatnccaagatatatacggcaaaaagaagactcgagcagnccnggcacgagaggcctcctatctcagtaatnagantgagcagtacaaganagctnaagactatntnatcatgctgaaggatggtacggcaatggngcgtcgacgctgtactgatctacaaccanacggncgnnaccctncngt

SEQ ID NO: 6296 - DNA, 273 bp, Zea mays
  misc_feature: Incyte ID No: 700458831H1
  unsure 21, 29, 42, 48, 57, 108-109, 127, 151, 167, 171, 189, 224, 256, 268: a, t, c, g, or other
agctcagctccaacatggcanaaatctcnagccctagcaganactggngcggtgcancgagtccctgattgctgtcttccagaagtatgctggaaaggatggttatannctacactctctccaagancagagttcctaagcttcatgaaanaccagaactagctgancttnacaaagagtcagaaaggnccctggtgtcccttgaccgcatgcatgaagaaatnggacaccaacagtgatggtcagctagatttcncagaatttctantctgt

SEQ ID NO: 6297 - DNA, 269 bp, Zea mays
  misc_feature: Incyte ID No: 700458832H1
  unsure 14, 16, 44, 59, 152, 158, 182, 243, 246, 249: a, t, c, g, or other
ttgtgatttcatancnagttttctgaccagcttttgcggagatnttgaacagaactgcnatttcctctaatgaagaattctgtttagctgtgggtgtgccgggtggggtgtgtgtgatcaaaggacaaagacgtattttgacaaataacgantggagntttacactacattgtacaaggaangaaagtgtcacgggtaaaaactctaaaaggttaatttcgtcaaatgcagtagatgatgaanganagnttggtattatcaggaatgtt

SEQ ID NO: 6298 - DNA, 261 bp, Zea mays
  misc_feature: Incyte ID No: 700458835H1
  unsure 91, 127, 147, 158, 174, 216, 225: a, t, c, g, or other
gccgtttactcaatcctctgatcagggtgagcatcaaactcaaactacgccctgatcggcgcactgcgagcagtagcccaaacaatctcanatgaagtcaccctagccatcattctactatcaacantactaataatggctcctttnacctgctccanccttatcacaacacangaacacctctgattactcctgccatcatgacccttggccatnatatgattnatctccacactagcagagaccaaccgaacccccttg

SEQ ID NO: 6299 - DNA, 260 bp, Zea mays
  misc_feature: Incyte ID No: 700458840H1
  unsure 113: a, t, c, g, or other
gagcggccacagcctcgcgtcgtcgccccacagccacgcgagccttcgccgatccgcgagcgcagatcgccgaagccaggcggcggagagggagctcgaggcggcggaggaangcgttcgccacagtcgctgatttccctggggaagagatgggtctctcctttgggaagctgttcagccgcctcttcgccaagaaggagatgaggattctcatggtcgggctcgatgccgccggtaagaccaccatcctctacaagctc

SEQ ID NO: 6300 - DNA, 263 bp, Zea mays
  misc_feature: Incyte ID No: 700458845H1
  unsure 34, 45: a, t, c, g, or other
ctcctttgtgttgtggacattccatccttttatntatcacagcanacgttggtatactgtcctaatctggcgcagggtgcttgcttttttagttgcttcacaatttttaaggattattacattctattcgacccagctcccaggtccaaattatcattgtcgtgagggctcaaaactggcaactcttccaccacccaatagtgtacttgaagtgctcctgattaactttcctcgtggggtactttttggttgtggtgatttga

SEQ ID NO: 6301 - DNA, 267 bp, Zea mays
  misc_feature: Incyte ID No: 700458846H1
  unsure 23, 25, 47, 61, 134, 147, 220, 247, 256, 264: a, t, c, g, or other
ctccggtcgtctcctcgcgcttncnggttccccgtccccaccccacngccgggggcaaganatggagaacgcggtggtgctccgggagtggtttgaccgcgtcgacgccggccgcaccggcaacatcaccgctncccagctccaggncgctctcgctgtcggcaacctcaacttccccatctccgtcgtgcagcagatgattaggatgtatgacttcgancggaatggcaccatgaacttcgaagantttctggcncttaacanatc

SEQ ID NO: 6302 - DNA, 274 bp, Zea mays
  misc_feature: Incyte ID No: 700458847H1
  unsure 128, 130, 152, 180, 197, 207, 243, 272: a, t, c, g, or other
gaaagaaggtggagccttggagtggctattgaaaaattcctcggtcgcgaggccaatgaaagttctgcaattgaaagatgtgaaaacacaggctgattccaaccttcctataactggaacgggaatcnangcaaggtgttctcatcagcgangtcgtggtggatgcaagcttctcgaatncattaaaaagggtatcnacgccgccanaagaaaatagtgaaggacataaaagaaacctgggcngaccaataattaaaggacataggagttangt

SEQ ID NO: 6303 - DNA, 260 bp, Zea mays
  misc_feature: Incyte ID No: 700458850H1
  unsure 40, 67, 70, 127, 129, 199, 207, 231, 237, 239: a, t, c, g, or other
ttcgaacccaagcgcgctcaattctggaggaggtagaggntgaaaggagggccaggattcaactagnatnctgaagcgagggaagtgaaccctttgcttgcaatccagaatatcagtactaggcaancnttttccctcacttgccaggaatgtgctaggatcggtttggaggaagatgtctggatattaggattgcgtnttgcaccnactgaatcgatgatattgtgtagntggacnancataattgttgtagatatgtc

SEQ ID NO: 6304 - DNA, 257 bp, Zea mays
  misc_feature: Incyte ID No: 700458851H1
  unsure 4, 28, 38-39, 56, 63, 66, 78-79, 87, 92, 115, 129, 153, 185, 205, 219,229: a, t, c, g, or other
tgcnctactcaccagacgcctcaaccgncttttcatcnntcacccacatcactcgngacgtanatnatggctgaatcnnccgctacngtcangccaatggcgcctcaatatgctntatctgcctcttcntacactgcggacgaggcctatatnacggatcatgtctctactcagaaacctgaaanatcggcattatcctcctgcntgcaactatagcancagccttcanaggcgatgtcctcccgtgaggccaaata

SEQ ID NO: 6305 - DNA, 263 bp, Zea mays
  misc_feature: Incyte ID No: 700458854H1
  unsure 4, 17, 21, 24, 29, 41, 46, 72, 93, 95, 102, 105, 117, 121, 136, 139,147, 161, 164, 168, 174, 201, 211, 219, 244: a, t, c, g, or other
atangcctagaccaagnagtnatnaaacncgaactgacacngagcnacaacccaaacaacccagctctcccnaagcttcaaactagactactncnccataanatncatccctgtagncatngtgcggtacatggtncancatagaantctcactgtgatanatnaacncagacncaaaacattaatcagttcttcaaatanctactgcatnttcctaantaccatactaatcttagtgaccgcnaacaacctattccaactgg

SEQ ID NO: 6306 - DNA, 258 bp, Zea mays
  misc_feature: Incyte ID No: 700458855H1
  unsure 201: a, t, c, g, or other
aaagacattctttttttcctgataaatcatgcccaaataaaggaaaacgtcttccggccaagccatgcagcttaggcctcattagcacttacaaggtggatagtgttacatctaaaagtcccaacttctatgtaacatctggcataagggactgggggcagcaaaatgcaagtgttgccttgtaacttataggaaaatgtnctgtaagtttctaggtcaggatgtacattattgattgcaaaatttttctaggtatct

SEQ ID NO: 6307 - DNA, 258 bp, Zea mays
  misc_feature: Incyte ID No: 700458857H1
  unsure 2: a, t, c, g, or other
cngccacctacgcaacaccagacgctccagcagtccagcactcggagctcgcgcgcccgacggcccaccatgatcatccccaagaagaaccgcaatgagatctgcaagtacctcttcaaggagggcgtgctgtatgccaagaaggactacaacctggcgaagacccacagattgatgtgcccaacctccaggtgatcaagctcatgcagagctttcaagtccaaggagtatgtcagagagaccttctcctggcagtat

SEQ ID NO: 6308 - DNA, 256 bp, Zea mays
  misc_feature: Incyte ID No: 700458858H1
gtgacaacaagttggttggacgggaagcatgtggtgtttggcaaggtgttgtctggaatggatgttgtgtacaaggtcgaagctgaaggccggcagagtggggagccgaagagcaaggttgtgatagcagatagcggcgagctgccgatgtgacggcgagctgaacttatgttccatcccgaagcatgatgataagaccttgctggtggccgtctgtcgttctagaactgttaggccctgtttggaatcttagggg

SEQ ID NO: 6309 - DNA, 259 bp, Zea mays
  misc_feature: Incyte ID No: 700458859H1
  unsure 12, 193, 197, 213, 216, 226: a, t, c, g, or other
ctcctctcctcnccggccccttcactccaccaacgaaccccacgcaggcagcagcacgcgcaagccgcaaggcaaggcacaaacactaggggccgggcatggcgacgcgggcggacgtggagaagggcgggccggcgaggaaggagcccggcaaggtgccgtcgccgctgtacccgcagcacgagggggagcnggantgggtgccctggctcntcnccgtcatctncgtcgccagcatcaccgtcttcgtcgtcaccat

SEQ ID NO: 6310 - DNA, 260 bp, Zea mays
  misc_feature: Incyte ID No: 700458861H1
  unsure 48: a, t, c, g, or other
ggacgagcttaagcagatgcaacctgaggatgaatcaaagaaaaagangctagatatcctcaagcggctccacttggaagaagagatggcatcagatggtgaagatgagtccatgttatcagaggagctattcaaaaagttatgtctggggaagagataaagctggaagacctctctgattgtgaaatcaaacgattccgtcaagctctggcctcaggtgagctcataagatgattgaaccgtggacaccttggtggaaa

SEQ ID NO: 6311 - DNA, 268 bp, Zea mays
  misc_feature: Incyte ID No: 700458862H1
  unsure 114, 128, 131, 138: a, t, c, g, or other
gctgtctccccggctggctggctcgctctctcctggggacacagaggggggcatgcagcacacagagggacctacgggcagctgttccttcccccgactcaagaatccccggangcccggaggctgcnagnaggatcngtccatgaagaagctgatggtggtgctgagtctgattgctgcagcctgggcataggagcagaataagttggtgcatgggcggaccctgcgacaagacatcttcacccctaccaagctgccctctacacct

SEQ ID NO: 6312 - DNA, 267 bp, Zea mays
  misc_feature: Incyte ID No: 700458863H1
  unsure 29, 42, 50, 126: a, t, c, g, or other
cttctcctccggcatcgacgaggcgaacnccaggcgcccgantcactctncctgctcccacgacccatggcggcggatatggcgtacgcgccgccgatgaaggcgggcaaggccgggttcgaggcnggcatgatggatcgcagcacaggatcgcatcacgctctcctccaagagcgtcaagaactcgagaaaagtctgcggggatctggtgaagggcgcccaagggtaaggagctcaaggtcaagggccccgtgcggatgcctacca

SEQ ID NO: 6313 - DNA, 269 bp, Zea mays
  misc_feature: Incyte ID No: 700458864H1
  unsure 41, 50, 192, 225, 242, 246-247, 261: a, t, c, g, or other
cacgctcagccttgagcttgtcaagcacccaagcgtgaganaggtatcancattgatatcgctctgtggaagtttgagaccaccaagtactactgcactgtcattgatgcccctggacatcgccgacttcatcaagaacatgatcacgggtacctcccaggctgaactgtgctgtctgatcattgactccancactggtggttttgaggccggtatctctaaggntgcccagacccgtgagnaggnnctccttgtttaaanccttgggg

SEQ ID NO: 6314 - DNA, 80 bp, Zea mays
  misc_feature: Incyte ID No: 700458865H1
  unsure 10-11, 13-14, 23, 47, 58, 61, 65: a, t, c, g, or other
ccgacgaggnngnnatggatgangaggattactacgactactgctanagcgtacgtgnatnacgnacggcgacggcggga

SEQ ID NO: 6315 - DNA, 253 bp, Zea mays
  misc_feature: Incyte ID No: 700458866H1
  unsure 43, 60, 63, 82, 89, 103, 125, 146: a, t, c, g, or other
gcgcaccgcacacctcactgccgctcccttctcgtctcctctnctctcctctcctcggcnganccggcaccgacccaccgcncctctgntcgctccttccgcnggaatcgctgctcctctctgtnctgtcgatttgtgcggcgacngttagtttggttcggtcccatccttctgttgatcaatggctgacggtgaggatatccagccacttgtgtgtgacaatggcactggaatggtcaaggctggcttttct

SEQ ID NO: 6316 - DNA, 255 bp, Zea mays
  misc_feature: Incyte ID No: 700458868H1
gctggagcatgggctcttcttttccccttaagaaaacaacgaaagcccttcccaagattcaaattgacgacgactctgatctgattgatgaagacagtctcttgactgaggaggacctgaagaaaccacaattccagttggtagagcaacaaaacccgtcaacttagttcaactccataagcaatagccagtttaggtttggattctaaacagttaagtgatgttttcactgatgttttcaccagttggggactg

SEQ ID NO: 6317 - DNA, 255 bp, Zea mays
  misc_feature: Incyte ID No: 700458869H1
tgataagtaaaaactgcaaccatttctgtgaggatatctgcaaaaggttgacaggaaattttattccaaaatgggtgaatcgacttgctagaatgggtgctgtttgcaactgcattctaccagagtccctcaagatcaacgcggccggtcatgacccagcttctcgagctgaagatagcgagagaaaaatgctgacaagttccttcagttgcttctgttcaatctctctatgccaaagacatttctcaacatctt

SEQ ID NO: 6318 - DNA, 260 bp, Zea mays
  misc_feature: Incyte ID No: 700458870H1
  unsure 180, 217: a, t, c, g, or other
ggcgcacagcacacgaacacacaccgcgcccagctccgaggtgatcttccggcggccggcgagatgagccgtggcacaggcgcgggctatgaccgccacatcaccatcttctcccccgagggacgcctgtaccaagttcgagtacgcgttcaaggcggtgaagtcggcgggtgtcacgtncgatcggtcgtccgcggcgcggacttccgtctgcgtngttacgcagaagaaagtcccggataagttgctggatcagacga

SEQ ID NO: 6319 - DNA, 255 bp, Zea mays
  misc_feature: Incyte ID No: 700458871H1
ccacaaccccgagtccccaacccaccacggcgttgcggaatccacctgcaactgcaagcccacgaaatcgagccgagccccgacgccaccaaatcgtgtggcctcggagatcgagcagggtctggaagaaccaggggagagaccgtcagaagaggaggaccagcagcaggcaggcggtggtggcgaagtcgtcggcgtcggcggccggggtatctacgatgataacccggtcgaagctggtggagcaactgcgcg

SEQ ID NO: 6320 - DNA, 254 bp, Zea mays
  misc_feature: Incyte ID No: 700458874H1
  unsure 6, 40, 81, 125, 128, 131, 238: a, t, c, g, or other
caccanccaactgttgatattataaagatccgttatgcanatgagctgttgacaaatccagttttaaagagggactatganctttttggactggatgagcataaggatgtccttgagagagtcanagnacnatatcaaatggtgcactttctcaaaattgatcttccattgttaaaagactctgtagtcagtttgatcgatgatgcctcaatgtactcacacatgagtcgttcatgtnctgctattagtgaaga

SEQ ID NO: 6321 - DNA, 256 bp, Zea mays
  misc_feature: Incyte ID No: 700458875H1
  unsure 23: a, t, c, g, or other
gcttttcatcctcctctgctgcnttcctcctccatttccagagtcagacagagtagggggcagcagaaatgccaggccagccccctcctcccaccggccttctctcagctcttaccactctcctgggagcctggtgccagagcagggtttgcaggcagagtccgggggaggctgggaagccggcctacccaggggccggccaatccccagccttggcaagaaccagggcctcccccttctgctctgtatctgtaaa

SEQ ID NO: 6322 - DNA, 213 bp, Zea mays
  misc_feature: Incyte ID No: 700458877H1
  unsure 39, 79, 87, 144, 162, 187: a, t, c, g, or other
ggagctagctagcgtcgtctcctccggtgaggtgatgancagaggagaattccagacctcccttgtccagcagatgatnctggagcngcgcggcggcggcaataccacagcggcaggcagcagcaacatcatgagcagcggctncaagcagtcttgccatgnggatcaacaagaggcctcccgcaanctgcagctgctgccctcctatcgtct

SEQ ID NO: 6323 - DNA, 263 bp, Zea mays
  misc_feature: Incyte ID No: 700458878H1
  unsure 48-49, 73: a, t, c, g, or other
ccaaacccactccaccttactaccagacaaccttaaccaaaccatggnnccaaataaagtataggcgataganattgaaacctggcgcaatagatatagtaccgcaagggaaagatgaaaaattataaccaagcataatatagcaaggactaacccctataccttctgcataatgaattaactagaaataactttgcaaggagagccaaagctaagacccccgaaaccagacgagctacctaagaacagctaaaagagcacac

SEQ ID NO: 6324 - DNA, 265 bp, Zea mays
  misc_feature: Incyte ID No: 700458879H1
  unsure 59, 241: a, t, c, g, or other
gcctaacatcaactgggtgaagagctatatgttcctttctcaagaggcactacaagtgnacatgccactgggcagcactgttcacattatgtaagtgataaaattgacctaaatatccatccaatggacaaatagatcaagaaaacatgataaacatacacagtggaatactatacagctacaaaaagaatgaccttctgtcatttgtgacaacgtggataaacctgcaggacattctgtnaagtgaatcaaccagggggcaggt

SEQ ID NO: 6325 - DNA, 266 bp, Zea mays
  misc_feature: Incyte ID No: 700458880H1
  unsure 91, 205, 230: a, t, c, g, or other
cttgccatctcactgccttccttggctacaaggctggcatgactcacattgtccgtgaggttgagaagccaggatccaaactccataaganggaaacttgtgaggctgttaccatcattgaaacccctcctcttgtcattgttgggcttcgtggcatatgtgaagactcctcgtgggcctccgcacactcaactctgtttgggcncaacatcttagcgaagaattgaggngaaggttctacaagaatggtgcaagagcaagaagag

SEQ ID NO: 6326 - DNA, 254 bp, Zea mays
  misc_feature: Incyte ID No: 700458883H1
  unsure 3, 25, 32, 58, 71, 115, 210, 215: a, t, c, g, or other
ggnaaggttaaaaaaagtaaaaggnactcggncaaatcttaccccgcctgtttaccanaaacatcacctcnagcatcaccagtattagaggcaccgcctgcccagtgacacatgnttaacggccgcggtagcctaaccgtgcaaaggtagcataatcacttgttccttaattagggacctgtatgaatggctccacgagggttcagctgnctctnacttttaaccagtgaaattgacctgcccgtgaagaggcg

SEQ ID NO: 6327 - DNA, 249 bp, Zea mays
  misc_feature: Incyte ID No: 700458885H1
  unsure 129: a, t, c, g, or other
gagctttgagcgtatccacagaagcaacttggtggggatgggaatcattcctctgtgcttcaaagctggtgaggatgctgattcacttggcctcactggacatgagcggtacagcatcgatctccctancaacctcagtgagatccgtcccggccaggatgtgactgttactaccgacaatgggaaatctttcacttgcatcgttcgcttgacactgaggtggagctggcgtattcaaccatggaggca

SEQ ID NO: 6328 - DNA, 86 bp, Zea mays
  misc_feature: Incyte ID No: 700458887H1
  unsure 4: a, t, c, g, or other
gtgnacctccaagaacctagaaacccaaagccatgagccctttggctgggtatgttagaaatgcccataactgggagcttacatac

SEQ ID NO: 6329 - DNA, 242 bp, Zea mays
  misc_feature: Incyte ID No: 700458889H1
gtgaccagtaagcgtgcacaagatttgaccactttaaagtttgttccacgggatcaactctttgtaactggatcagcagataagactgttcgcatttggcaagagaacgagaatggaaactataactgcgtccatacattgaaagatcatactgctgaggttgaagctgttacagtacatgcgactcagaagtattttgtgagtgcttccaaggataattcgtggtgcttctatgatatttc

SEQ ID NO: 6330 - DNA, 257 bp, Zea mays
  misc_feature: Incyte ID No: 700458892H1
  unsure 139, 156, 167, 178: a, t, c, g, or other
ctcagacgctcaggaaatagaaaccgtctgaactatcctgcccgccatcatcctagtcctcatcgccctcccatccctacgcatcctttacataacagacgaggtcaacgatccctcccttaccatcaaatcaattggnccaccaatggtactganccctacgagtncaccgactacngcggactaatcttcaactcctacatacttcccccattattcctagaaccaggcgacctgcgactccttgacgttgacaa

SEQ ID NO: 6331 - DNA, 258 bp, Zea mays
  misc_feature: Incyte ID No: 700458893H1
  unsure 43, 46: a, t, c, g, or other
cttctggctcctccgccaggtcttgccgtccagcggcctcacngcnctcgagatttgctcggcacggtcgccttgtttgccgcctgcagcgttctcccactcggctacgggctacgcctgacgccaccgttaacggcgacatccgaacgggccccgacacccatctcgcgctcagaaaagggataagcagttgtgatcctgtcctcttggtcggatgcggggttactatgacatcgatgacatcctcatggaggatga

SEQ ID NO: 6332 - DNA, 88 bp, Zea mays
  misc_feature: Incyte ID No: 700458896H1
  unsure 48, 66, 68, 72, 75-76, 79, 81, 83, 86: a, t, c, g, or other
gacacaacaagtacccaaccactccttgattcccctttcctccctctncgcattcgtctccaccancnggtnggnnttntngntgngc
